(19) United States
(12) Patent Application Publication
(10) Pub. No.: US 2024/0254482 A1
(43) Pub. Date: Aug. 1, 2024

(54) METHODS FOR TREATING OR PREVENTING CONTACT-ACTIVATION PATHWAY-ASSOCIATED DISEASES USING iRNA COMPOSITIONS TARGETING FACTOR XII (HAGEMAN FACTOR) (F12)

(71) Applicant: Alnylam Pharmaceuticals, Inc., Cambridge, MA (US)

(72) Inventors: James Butler, Lynnfield, MA (US); Jingxuan Liu, West Roxbury, MA (US)

(21) Appl. No.: 18/234,952

(22) Filed: Aug. 17, 2023

Related U.S. Application Data
(63) Continuation of application No. 17/487,019, filed on Sep. 28, 2021, now abandoned.
Application No. 17/487,019 is a continuation of application No. 16/621,754, filed on Dec. 12, 2019, now abandoned.
(60) Provisional application No. 62/529,664, filed on Jul. 7, 2017.

(51) Int. Cl. C12N 15/113; A61P 9/00

(52) U.S. Cl. CPC C12N 15/113; A61P 9/00; C12N 2310/11; C12N 2310/14; C12N 2310/315; C12N 2310/344; C12N 2310/346; C12N 2310/351

(57) ABSTRACT

The present invention relates to methods of use of RNAi agents, e.g., double stranded RNAi agents, targeting a Factor XII (Hageman Factor (F12) gene, for treating subjects having a contact activation pathway-associated disease, such as a thrombophilia or hereditary angioedema (HAE), methods for preventing at least one symptom in a subject having a contact activation pathway-associated disease, such as a thrombus formation or an angioedema attack, and RNAi agents targeting an F12 gene, for use in the methods of the invention.

### RELATED APPLICATIONS

[0001] The present application is a continuation of U.S. patent application Ser. No. 17/487,019, filed on Sep. 28, 2021, which is a continuation of U.S. patent application Ser. No. 16/621,754, filed on Dec. 12, 2019, which is a 35 U.S.C. § 371 national stage filing of International Application No. PCT/US2018/040967, filed on Jul. 6, 2018, which in turn claims the benefit of priority to U.S. Provisional Patent Application No. 62/529,664, filed on Jul. 7, 2017. The entire contents of each of the foregoing applications are incorporated herein by reference.

[0002] The present application is related to U.S. Provisional Patent Application No. 62/157,890, filed on May 6, 2015, U.S. Provisional Patent Application No. 62/260,887, filed on Nov. 30, 2015, U.S. Provisional Patent Application No. 62/266,958, filed on Dec. 14, 2015, and International Application No. PCT/US2016/030876, filed on May 5, 2016. The entire contents of each of the foregoing applications are incorporated herein by reference.

### SEQUENCE LISTING

[0003] The instant application contains a Sequence Listing which has been submitted electronically in XML format and is hereby incorporated by reference in its entirety. Said XML copy, created on Feb. 20, 2024, is named 121301_07604_SL.xml and is 9,423,173 bytes in size. The sequence listing is part of the specification and is incorporated in its entirety by reference herein.

### BACKGROUND OF THE INVENTION

[0004] The blood coagulation system is essential for hemostasis, responding to vascular injury with local production of a clot formed of fibrin mesh and activated platelets. Blood coagulation, thrombin generation, and fibrin formation can be initiated by two distinct pathways, referred to as the extrinsic and intrinsic pathways.

[0005] The extrinsic pathway involves binding of plasma factor VIIa (FVIIa) to extravascular tissue factor (TF) at a site of vessel injury.

[0006] The intrinsic pathway is initiated by the surface-dependent activation of plasma factor XII (F12) to F12a in a process called contact activation. Contact activation involves two other proteins, prekallikrein and high molecular weight kininogen which circulate as a bi-molecular complex. Collectively, these three proteins, FXII, prekallikrein and HK, comprise the “contact activation pathway,” also referred to as the “Kallikrein-Kinin System.” When the contact activation pathway is initiated by binding of F12 to negatively charged surfaces (or macromolecules), a conformational change in F12 is induced resulting in formation of active F12 (F12a). F12a cleaves prekallikrein to generate active kallikrein ((α-kallikrein), which in turn reciprocally activates F12 to generate additional F12a. The active kallikrein then digests high-molecular-weight kininogen to liberate bradykinin. F12a generated by contact activation also activates factor XI (F11) to F11a, triggering a series of proteolytic cleavage events that culminates in thrombin generation and fibrin clot formation.

[0007] Interestingly, it has been shown that the contact system is not required for hemostasis.

[0008] Humans and other animals deficient in a contact activation protein are largely asymptomatic and homozygous F12 deficiency is not associated with any disease or disorder. However, the contact system has been shown to play an important role in thrombotic disease, as pharmacologic inhibition of F12a or ablation of the F12 or high molecular weight kininogen genes can protect mice from experimentally induced thrombosis in a variety of models.

[0009] In healthy subjects, a homeostatic balance between procoagulant forces and anticoagulant and fibrinolytic forces exists. However, numerous genetic, acquired, and environmental factors can dysregulate this balance in favor of coagulation, leading to thrombosis, the pathologic formation of thrombi, triggering life-threatening events For example, formation of thrombi in a vein may result in, e.g., deep venous thrombosis (DVT), and formation of thrombi in an artery or a cardiac chamber may result in, e.g., myocardial infarction or stroke. Thrombi may obstruct blood flow at the site of formation or detach and embolize to block a distant blood vessel (e.g., a pulmonary embolism or embolic stroke).

[0010] Acquired/enviornomental factors that can lead to pathological contact activation and contact pathway-mediated thrombosis include various dental, surgical and medical settings, such as atrial fibrillation, cancer treatment, immobilization, central venous catheters, implants, and extracorporeal oxygenation. As a result of such medical and surgical settings, tissue damage releases tissue factor and exposes various triggers of the contact pathway, such as DNA, RNA, phosphate, collagen, and laminin) which activate the contact pathway leading to thrombosis.

[0011] A genetic disorder that dysregulates the homeostatic balance between procoagulant forces and anticoagulant and fibrinolytic forces is Hereditary Angioedema (HAE). HAE is a rare autosomal dominant disorder that causes recurrent edema and swelling of the extremities, face, larynx, upper respiratory tract, abdomen, trunk, and genetials and a nonpruritic rash in one-third of patients. Untreated HAE patients experience an average of one-to-two angioedema attacks per month, but the frequency and severity of episodes can vary significantly. Edema swelling is often disfiguring and disabling, results in frequent hospitalization, and patients sometimes require psychiatric care to treat disease-associated anxiety. Abdominal attacks can cause severe pain, nausea and vomiting, and sometimes lead to inappropriate surgeries. Furthermore, over half of HAE patients also experience life-threatening laryngeal edema during their lifetime that may require emergency tracheostomy to prevent asphyxiation. HAE affects an estimated 6,000 to 10,000 individuals of varying ethnic groups in the United States and causes significant economic harm to patients, accounting for 15,000 to 30,000 hospital visits and 20 to 100 sick days per year.

[0012] HAE results from a mutation of the C1 inhibitor (C1INH, SERPING1) gene that results in a deficiency of C1INH protein. Over 250 different C1INH mutations have been demonstrated to cause an HAE clinical presentation. These C1INH mutations are typically inherited genetically, however, up to 25% of HAE cases result from de novo mutation of C1INH. HAE type I is caused by C1INH mutations that result in lower levels of truncated or misfolded proteins that are inefficiently secreted, and accounts for approximately 85% of HAE cases. HAE type II constitutes about 15% of cases and is caused by mutations near the C1INH's active site that result in normal levels of dysfunctional C1INH protein. In addition, HAE type III, a rare third form the disease, occurs because of a gain-of-function mutation in coagulation factor XII (F12) (Hageman Factor).

[0013] C1 inhibitor is a serine protease inhibitor of the serpin family and a major inhibitor of proteases in the complement and contact activation pathways, as well as a minor inhibitor of fibrinolytic protease plasmin. These plasma proteolytic cascades are activated during an HAE attack, generating substances that increase vascular permeability, e.g., bradykinin. Studies have shown that the bradykinin peptide, which activates proinflammatory signaling pathways that dilate vessels and induces chemotaxis of neutrophils, is the primary substance that enhances vascular permeability in an HAE attack by binding to the bradykinin receptor on vascular endothelial cells.

[0014] Typically, C1INH inhibits the autoactivation of F12 the ability of F12a to activate prekallilrein, the activation of high molecular weight kininogen by kallikrein, and the feedback activation of F12 by kallikrein. Consequently, mutations causing C1INH deficiency or F12 gain-of-function result in excess production of bradykinin and onset of HAE angioedema.

[0015] Currently, HAE may be treated with 17α-alkylated androgens prophylactically to reduce to probability of recurrent episodes, or with disease-specific therapeutics to treat acute attacks. About 70% of individuals with HAE are treated with androgens or remain untreated, and about 30% receive therapeutics. Androgens are unsuitable for short-term treatment of acute attacks because they take several days to become effective, and they can have significant side effects and may affect growth and development adversely. As a result, androgens are used only for long-term prophylaxis and are typically not administered to pregnant women or children. Furthermore, current therapeutics used to treat acute attacks must be administered intravenously numerous times per week or may cause side-effects that require drug administration and subsequent patient monitoring in a hospital, thereby limiting their regular prophylactic use to manage the disease long-term. Therefore, in the absence of regimens which be administered safely, effectively and by more convenient routes and regimens to treat acute angioedema attacks and prophylactically manage recurrent attacks in a large proportion of patients, including pregnant women and children, there is a need for alternative therapies for subjects suffering from HAE.

[0016] Accordingly, there is a need in the art for compositions and methods to inhibit thrombosis in a subject at risk of forming a thrombus, such as a subject having a genetic, an acquired, or an environmental risk of forming a thrombus.

### SUMMARY OF THE INVENTION

[0017] The present invention provides methods of treating or preventing a subject having a contact activation pathway-associated disease, e.g., thrombophilia, hereditary angioedema (HAE), Flectcher Factor Deficiency, or essential hypertension, using iRNA compositions which effect the RNA-induced silencing complex (RISC)-mediated cleavage of RNA transcripts of a Factor XII (F12) gene. The present invention also provides methods of preventing at least one symptom, such as thrombus formation or an angioedema attack, in a subject having a contact activation pathway-associated disease using iRNA compositions which effect the RNA-induced silencing complex (RISC)-mediated cleavage of RNA transcripts of a Factor XII (F12) gene. In addition, the present invention provides iRNA compositions which effect the RNA-induced silencing complex (RISC)-mediated cleavage of RNA transcripts of a contact activation pathway-associated gene, such as a Factor XII (F12) gene, for use in the methods of the present invention.

[0018] Accordingly, in one aspect, the present invention provides a double stranded ribonucleic acid (dsRNA) agent for use in the treatment of a subject having a contact activation pathway-associated disease. The dsRNA agent includes a sense strand and an antisense strand forming a double stranded region, wherein the antisense strand comprises a region of complementarity to an mRNA encoding F12, wherein the region of complementarity comprises at least 15 contiguous nucleotides differing by no more than 3 nucleotides from the nucleotide sequence of 5′-UUCAAAGCACUUUAUUGAGUUUC-3′ (SEQ ID NO:899), wherein when the dsRNA agent is administered to the subject, hemostasis in the subject is not inhibited.

[0019] In another aspect, the present invention provides a double stranded ribonucleic acid (dsRNA) agent that inhibits the expression of F12 for use in preventing at least one symptom in a subject having a contact activation pathway-associated disease. The dsRNA agent includes a sense strand and an antisense strand forming a double stranded region, wherein the antisense strand comprises a region of complementarity to an mRNA encoding F12, wherein the region of complementarity comprises at least 15 contiguous nucleotides differing by no more than 3 nucleotides from the nucleotide sequence of 5′-UUCAAAGCACUUUAUUGAGUUUC-3′ (SEQ ID NO:899), wherein when the dsRNA agent to the subject, hemostasis in the subject is not inhibited.

[0020] In one aspect, the present invention provides a double stranded ribonucleic acid (dsRNA) agent that inhibits the expression of F12 for use in preventing formation of a thrombus in a subject at risk of forming a thrombus. The dsRNA agent includes a sense strand and an antisense strand forming a double stranded region, wherein the antisense strand comprises a region of complementarity to an mRNA encoding F12, wherein the region of complementarity comprises at least 15 contiguous nucleotides differing by no more than 3 nucleotides from the nucleotide sequence of 5′-UUCAAAGCACUUUAUUGAGUUUC-3′ (SEQ ID NO:899), wherein when the dsRNA agent to the subject, hemostasis in the subject is not inhibited.

[0021] In one embodiment, the subject is a human.

[0022] The contact activation pathway-associated disease may be thrombophilia, hereditary angioedema (HAE), Flectcher Factor Deficiency, or essential hypertension.

[0023] Administration of the dsRNA agent to the subject may decrease platelet deposition in the subject and/or decrease fibrin deposition in the subject.

[0024] The dsRNA may be suitable for administration to the subject at a dose of about 0.01 mg/kg to about 10 mg/kg or about 0.5 mg/kg to about 50 mg/kg.

[0025] In one embodiment, the dsRNA agent is suitable for subcutaneous administration to the subject.

[0026] The region of complementarity may be at least 16, 17, 18, 19, 20, 21, 22, or 23 nucleotides in length.

[0027] In one embodiment, each strand of the dsRNA may is no more than 30 nucleotides in length.

[0028] In one embodiment, each of the sense strand and the antisense strand independently is 21 to 23 nucleotides in length. In another embodiment, the sense strand is 21 nucleotides in length and the antisense strand is 23 nucleotides in length.

[0029] In one embodiment, the dsRNA agent comprises at least one modified nucleotide.

[0030] In one embodiment, substantially all of the nucleotides of the dsRNA agent are modified nucleotides.

[0031] In one embodiment, the modified nucleotide of the dsRNA agent is selected from the group consisting of a deoxy-nucleotide, a 3′-terminal deoxy-thymine (dT) nucleotide, a 2′-O-methyl modified nucleotide, a 2′-fluoro modified nucleotide, a 2′-deoxy-modified nucleotide, a locked nucleotide, an unlocked nucleotide, a conformationally restricted nucleotide, a constrained ethyl nucleotide, an abasic nucleotide, a 2′-amino-modified nucleotide, a 2′-O-allyl-modified nucleotide, 2′-C-alkyl-modified nucleotide, 2′-hydroxly-modified nucleotide, a 2′-methoxyethyl modified nucleotide, a 2′-O-alkyl-modified nucleotide, a morpholino nucleotide, a phosphoramidate, a non-natural base comprising nucleotide, a tetrahydropyran modified nucleotide, a 1,5-anhydrohexitol modified nucleotide, a cyclohexenyl modified nucleotide, a nucleotide comprising a phosphorothioate group, a nucleotide comprising a methylphosphonate group, a nucleotide comprising a 5′-phosphate, and a nucleotide comprising a 5′-phosphate mimic.

[0032] In one embodiment, the dsRNA agent further comprises at least one phosphorothioate internucleotide linkage. In another embodiment, the dsRNA agent further comprises 6-8 phosphorothioate internucleotide linkages.

[0033] In one embodiment, at least one strand of the dsRNA agent comprises a 3′ overhang of at least 1 nucleotide. In another embodiment, the dsRNA agent, at least one strand of the dsRNA agent comprises a 3′ overhang of at least 2 nucleotides

[0034] In one embodiment, the dsRNA agent further comprises a ligand.

[0035] In one embodiment, the ligand is conjugated to the 3′ end of the sense strand of the dsRNA agent.

[0036] In one embodiment, the ligand is an N-acetylgalactosamine (GalNAc) derivative through a monovalent, a bivalent, or a trivalent branched linker.

[0037] In one embodiment, the ligand is

[chemical structure]

[0038] In one embodiment, the dsRNA is conjugated to the ligand as shown in the following schematic

[chemical structure]

and, wherein X is O or S.

[0039] In one embodiment, the X is O.

[0040] In one embodiment, the dsRNA agent comprises a sense strand comprising the nucleotide sequence of 5′-AACUCAAUAAAGUGCUUUGAA-3′ (SEQ ID NO:891), and an antisense strand comprising the nucleotide sequence of 5′-UUCAAAGCACUUUAUUGAGUUUC-3′ (SEQ ID NO:899).

[0041] In one embodiment, the dsRNA agent comprises a sense strand comprising the sequence of 5′-asascucaAfuAfAfAfgugcuuugaa-3′ (SEQ ID NO:907) and an antisense strand comprising the sequence of 5′-usUfscaaAfgCfAfcuuuAfuUfgaguususc-3′ (SEQ ID NO:915), and wherein a, c, g, and u are 2′-O-methyl (2′-OMe) A, C, G, and U; Af, Cf, Gf, and Uf are 2′-fluoro A, C, G, and U; and s is a phosphorothioate linkage.

[0042] In one embodiment, the dsRNA agent further comprises a ligand.

[0043] In one aspect, the present invention provides a double stranded ribonucleic acid (dsRNA) agent for use in the treatment of a subject having a contact activation pathway-associated disease. The dsRNA agent includes a sense strand and an antisense strand forming a double stranded region, wherein the sense strand comprises the sequence of 5′-asascucaAfuAfAfAfgugcuuugaa-3′ (SEQ ID NO:907) and an antisense strand comprising the sequence of 5′-usUfscaaAfgCfAfcuuuAfuUfgaguususc-3′ (SEQ ID NO:915), and wherein a, c, g, and u are 2′-O-methyl (2′-OMe) A, C, G, and U; Af, Cf, Gf, and Uf are 2′-fluoro A, C, G, and U; and s is a phosphorothioate linkage, wherein when the dsRNA agent is administered to the subject, hemostasis in the subject is not inhibited.

[0044] In another aspect, the present invention provides a double stranded ribonucleic acid (dsRNA) agent that inhibits the expression of F12 for use in preventing at least one symptom in a subject having a contact activation pathway-associated disease. The dsRNA agent includes a sense strand and an antisense strand forming a double stranded region, wherein the sense strand comprises the sequence of 5′-asascucaAfuAfAfAfgugcuuugaa-3′ (SEQ ID NO:907) and an antisense strand comprising the sequence of 5′-usUfscaaAfgCfAfcuuuAfuUfgaguususc-3′ (SEQ ID NO:915), and wherein a, c, g, and u are 2′-O-methyl (2′-OMe) A, C, G, and U; Af, Cf, Gf, and Uf are 2′-fluoro A, C, G, and U; and s is a phosphorothioate linkage, wherein when the dsRNA agent is administered to the subject, hemostasis in the subject is not inhibited.

[0045] In one aspect, the present invention provides a double stranded ribonucleic acid (dsRNA) agent that inhibits the expression of F12 for use in preventing formation of a thrombus in a subject at risk of forming a thrombus. The dsRNA agent includes a sense strand and an antisense strand forming a double stranded region, wherein the sense strand comprises the sequence of 5′-asascucaAfuAfAfAfgugcuuugaa-3′ (SEQ ID NO:907) and an antisense strand comprising the sequence of 5′-usUfscaaAfgCfAfcuuuAfuUfgaguususc-3′ (SEQ ID NO:915), and wherein a, c, g, and u are 2′-O-methyl (2′-OMe) A, C, G, and U; Af, Cf, Gf, and Uf are 2′-fluoro A, C, G, and U; and s is a phosphorothioate linkage, wherein when the dsRNA agent is administered to the subject, hemostasis in the subject is not inhibited.

[0046] In one embodiment, the dsRNA agent further comprises a ligand.

[0047] In one embodiment, the subject is a human.

[0048] The contact activation pathway-associated diseasemay be thrombophilia, hereditary angioedema (HAE), Flectcher Factor Deficiency, or essential hypertension.

[0049] Administration of the dsRNA agent to the subject may decrease platelet deposition in the subject and/or decrease fibrin deposition in the subject.

[0050] In one aspect, the present invention provides a method of treating a subject having a contact activation pathway-associated disease. The method includes administering to the subject a therapeutically effective amount of a double stranded ribonucleic acid (dsRNA) agent for inhibiting expression of F12, wherein the dsRNA agent comprises a sense strand and an antisense strand, the antisense strand comprising a region of complementarity which comprises at least 15 contiguous nucleotides differing by no more than 3 nucleotides from the complement of nucleotides 2000-2040 of SEQ ID NO:9, wherein administration of the dsRNA agent to the subject does not inhibit hemostasis in the subject, thereby treating the subject.

[0051] In another aspect, the present invention provides a method of preventing at least one symptom in a subject having a contact activation pathway-associated disease. The method includes administering to the subject a prohylactically effective amount of a double stranded ribonucleic acid (dsRNA) agent for inhibiting expression of F12, wherein the dsRNA agent comprises a sense strand and an antisense strand, the antisense strand comprising a region of complementarity which comprises at least 15 contiguous nucleotides differing by no more than 3 nucleotides from the complement of nucleotides 2000-2040 of SEQ ID NO:9, wherein administration of the dsRNA agent to the subject does not inhibit hemostasis in the subject, thereby preventing at least one symptom in the subject.

[0052] In one aspect, the present invention provides a method of preventing formation of a thrombus in a subject at risk of forming a thrombus. The method includes administering to the subject a prophylactically effective amount of a double stranded ribonucleic acid (dsRNA) agent for inhibiting expression of F12, wherein the dsRNA agent comprises a sense strand and an antisense strand, the antisense strand comprising a region of complementarity which comprises at least 15 contiguous nucleotides differing by no more than 3 nucleotides from the complement of nucleotides 2000-2040 of SEQ ID NO:9, wherein administration of the dsRNA agent to the subject does not inhibit hemostasis in the subject, thereby preventing formation of a thrombus in the subject at risk of forming a thrombus.

[0053] In one embodiment, the subject is a human.

[0054] The contact activation pathway-associated disease may be thrombophilia, hereditary angioedema (HAE), Flectcher Factor Deficiency, or essential hypertension.

[0055] The administration of the dsRNA agent to the subject may decrease platelet deposition in the subject and/or may decrease fibrin deposition in the subject.

[0056] The dsRNA agent may be administered to the subject at a dose of about wherein the dsRNA is administered at a dose of about 0.01 mg/kg to about 10 mg/kg or about 0.5 mg/kg to about 50 mg/kg.

[0057] In one embodiment, the dsRNA agent is subcutaneously administered to the subject.

[0058] The region of complementarity of the dsRNA agents for use in the methods of the invention may be at least 17 nucleotides in length.

[0059] Each strand of the dsRNA agents for use in the methods of the invention may be no more than 30 nucleotides in length.

[0060] In one embodiment, the dsRNA agent for use in the methods of the invention comprises at least one modified nucleotide.

[0061] In another embodiment, substantially all of the nucleotides of the dsRNA agent are modified nucleotides.

[0062] In one embodiment, the modified nucleotide of the dsRNA agent for use in the methods of the invention is selected from the group consisting of a deoxy-nucleotide, a 3′-terminal deoxy-thymine (dT) nucleotide, a 2′-O-methyl modified nucleotide, a 2′-fluoro modified nucleotide, a 2′-deoxy-modified nucleotide, a locked nucleotide, an unlocked nucleotide, a conformationally restricted nucleotide, a constrained ethyl nucleotide, an abasic nucleotide, a 2′-amino-modified nucleotide, a 2′-O-allyl-modified nucleotide, 2′-C-alkyl-modified nucleotide, 2′-hydroxly-modified nucleotide, a 2′-methoxyethyl modified nucleotide, a 2′-O-alkyl-modified nucleotide, a morpholino nucleotide, a phosphoramidate, a non-natural base comprising nucleotide, a tetrahydropyran modified nucleotide, a 1,5-anhydrohexitol modified nucleotide, a cyclohexenyl modified nucleotide, a nucleotide comprising a phosphorothioate group, a nucleotide comprising a methylphosphonate group, a nucleotide comprising a 5′-phosphate, and a nucleotide comprising a 5′-phosphate mimic.

[0063] In one embodiment, the dsRNA agent for use in the methods of the invention further comprises at least one phosphorothioate internucleotide linkage.

[0064] In one embodiment, at least one strand of the dsRNA agent for use in the methods of the invention comprises a 3′ overhang of at least 1 nucleotide.

[0065] In one embodiment, at least one strand of the dsRNA agent for use in the methods of the invention further comprises a ligand.

[0066] In one embodiment, the ligand is conjugated to the 3′ end of the sense strand of the dsRNA agent.

[0067] In certain embodiments, the ligand is one or more GalNAc derivatives attached through a monovalent, a bivalent, or a trivalent branched linker. In certain embodiments, the ligand is

[chemical structure]

[0068] In certain embodiments, the dsRNA is conjugated to the ligand as shown in the following schematic

[chemical structure]

and, wherein X is O or S.

[0069] In one embodiment, the X is O.

[0070] In one embodiment, the antisense strand of the dsRNA agent comprises at least 15 contiguous nucleotides differing by no more than 3 nucleotide from the nucleotide sequence of 5′-UUCAAAGCACUUUAUUGAGUUUC-3′ (SEQ ID NO:899).

[0071] In one embodiment, the dsRNA agent comprises a sense strand comprising the nucleotide sequence of 5′-AACUCAAUAAAGUGCUUUGAA-3′ (SEQ ID NO:891), and an antisense strand comprising the nucleotide sequence of 5′-UUCAAAGCACUUUAUUGAGUUUC-3′ (SEQ ID NO:899).

[0072] In one embodiment, the dsRNA agent comprises a sense strand comprising the sequence of 5′-asascucaAfuAfAfAfgugcuuugaa-3′ (SEQ ID NO:907) and an antisense strand comprising the sequence of 5′-usUfscaaAfgCfAfcuuuAfuUfgaguususc-3′ (SEQ ID NO:915), and wherein a, c, g, and u are 2′-O-methyl (2′-OMe) A, C, G, and U; Af, Cf, Gf, and Uf are 2′-fluoro A, C, G, and U; and s is a phosphorothioate linkage.

[0073] In one embodiment, the dsRNA agent further comprises a ligand.

[0074] In one embodiment, the methods and uses of the invention further comprise administering to the subject a double stranded RNAi agent of the invention targeting KLKB1. In another embodiment, the methods and uses of the invention further comprise administering to the subject a double stranded RNAi agent of the invention targeting KNG1.

[0075] In one embodiment, the administration of the double stranded RNAi to the subject causes a decrease in bradykinin levels or a decrease in coagulation factor XII activity.

[0076] In certain embodiment, the at least one symptom is an angioedema attack. In one embodiment, the at least one symptom is a thrombus formation.

[0077] In one embodiment, the methods and uses of the invention further comprise administering an anti-KLKB1 antibody, or antigen-binding fragment thereof, to the subject.

[0078] In one embodiment, the methods and uses of the invention further comprise measuring bradykinin and/or coagulation factor XII levels in the subject.

[0079] In one embodiment, the subject at risk of forming a thrombus has a contact activation pathway-associated disease or disorder.

[0080] In one embodiment, the contact activation pathway-associated disease is thrombophilia. In another embodiment, the contact activation pathway-associated disease is hereditary angioedema (HAE).

[0081] In other embodments, the contact activation pathway-associated disease is Flectcher Factor Deficiency or essential hypertension.

[0082] In one embodiment, the subject at risk of forming a thrombus is selected from the group consisting of a surgical patient; a medical patient; a pregnant subject; a postpartum subject; a subject that has previously had a thrombus; a subject undergoing hormone replacement therapy; a subject sitting for long periods; and an obese subject.

[0083] In another aspect, the present invention provides methods for inhibiting F12 expression in a cell.

[0084] The methods include contacting the cell with a double stranded RNAi agent or a pharmaceutical composition of the invention; and maintaining the cell for a time sufficient to obtain degradation of the mRNA transcript of a F12 gene, thereby inhibiting expression of the F12 gene in the cell.

[0085] In one aspect, the present invention provides double stranded ribonucleic acid (RNAi) agents for inhibiting expression of Factor XII (Hageman Factor) (F12), wherein the double stranded RNAi agent comprises a sense strand and an antisense strand, wherein the sense strand comprises at least 15 contiguous nucleotides differing by no more than 3 nucleotides from the nucleotide sequence of SEQ ID NO:9 and the antisense strand comprises at least 15 contiguous nucleotides differing by no more than 3 nucleotides from the nucleotide sequence of SEQ ID NO:10.

[0086] In another aspect, the present invention provides double stranded ribonucleic acid (RNAi) agents for inhibiting expression of a Factor XII (Hageman Factor) (F12), wherein the double stranded RNAi agent comprises a sense strand and an antisense strand, the antisense strand comprising a region of complementarity which comprises at least 15 contiguous nucleotides differing by no more than 3 nucleotides from any one of the antisense sequences listed in any one of Tables 3, 4, 9-12, 14, 15, 17, and 18.

[0087] In another aspect, the present invention provides double stranded ribonucleic acid (RNAi) agents for inhibiting expression of a Factor XII (Hageman Factor) (F12), wherein the double stranded RNAi agent comprises a sense strand and an antisense strand, the antisense strand comprising a region of complementarity which comprises at least 15 contiguous nucleotides differing by no more than 3 nucleotides from the complement of nucleotides 2000-2060 of SEQ ID NO:9. In some embodiments, the antisense strand comprises a region of complementarity which comprises at least 15 contiguous nucleotides differing by no more than 3 nucleotides from the complement of nucleotides 2000-2030 of SEQ ID NO:9. In other embodiments, the antisense strand comprises a region of complementarity which comprises at least 15 contiguous nucleotides differing by no more than 3 nucleotides from the complement of nucleotides 2030-2060 of SEQ ID NO:9. In one embodiment, the antisense strand comprises a region of complementarity which comprises at least 15 contiguous nucleotides differing by no more than 3 nucleotides from the complement of nucleotides 2010-2040 of SEQ ID NO:9. In one embodiment, the antisense strand comprises a region of complementarity which comprises at least 15 contiguous nucleotides differing by no more than 3 nucleotides from the complement of nucleotides 2010-2035 of SEQ ID NO:9. In another embodiment, the antisense strand comprises a region of complementarity which comprises at least 15 contiguous nucleotides differing by no more than 3 nucleotides from the complement of nucleotides 2015-2040 of SEQ ID NO:9. In another embodiment, the antisense strand comprises a region of complementarity which comprises at least 15 contiguous nucleotides differing by no more than 3 nucleotides fromthe complement of nucleotides 2015-2045 of SEQ ID NO:9. In another embodiment, the antisense strand comprises a region of complementarity which comprises at least 15 contiguous nucleotides differing by no more than 3 nucleotides from the complement of nucleotides 2020-2050 of SEQ ID NO:9. In another embodiment, the antisense strand comprises a region of complementarity which comprises at least 15 contiguous nucleotides differing by no more than 3 nucleotides from the complement of nucleotides 2020-2045 of SEQ ID NO:9. In still other embodiments, the antisense strand comprises a region of complementarity which comprises at least 15 contiguous nucleotides differing by no more than 3 nucleotides from any one of the ranges of SEQ ID NO:9 provided in Table 14 or 15. In one embodiment, the antisense strand comprises a region of complementarity which comprises at least 15 contiguous nucleotides differing by no more than 3 nucleotides from the complement of nucleotides 2018-2040 of SEQ ID NO:9. In one embodiment, the antisense strand comprises a region of complementarity which comprises at least 15 contiguous nucleotides differing by no more than 3 nucleotides from the nucleotide sequence of the antisense strand of AD-67244 (5′-UUCAAAGCACUUUAUUGAGUUUC-3′) (SEQ ID NO: 899). In one embodiment, the sense strand comprises the sense strand nucleotide sequence of AD-67244. In some embodiments, the region of complementarity comprises 15, 16, 17, 18, 19, 20, 21, 22, or 23 nucleotides differing by no more than 3 nucleotides from the complement of nucleotides 2015-2040 of SEQ ID NO:9. In some embodiments, the region of complementarity comprises 15, 16, 17, 18, 19, 20, 21, 22, or 23 nucleotides differing by no more than 3 nucleotides from the complement of nucleotides 2015-2045 of SEQ ID NO:9. In some embodiments, the region of complementarity comprises 15, 16, 17, 18, 19, 20, 21, 22, or 23 nucleotides differing by no more than 3 nucleotides from the complement of nucleotides 2018-2040 of SEQ ID NO:9. In some embodiments, the region of complementarity comprises 15, 16, 17, 18, 19, 20, 21, 22, or 23 nucleotides differing by no more than 3 nucleotides from the complement of nucleotides 2018-2045 of SEQ ID NO:9. In one embodiment, the agent comprises at least one modified nucleotide. In another embodiment, all of the nucleotides of theagent are modified nucleotides. In one embodiment, the agent further comprises a ligand, e.g., a ligand attached to the 3′-end of the sense strand. In one embodiment, the sense strand and the antisense strand are each independently 15-30 nucleotides in length. In another embodiment, the sense strand and the antisense strand are each independently 19-25 nucleotides in length.

[0088] In one embodiment, the antisense strand comprises a region of complementarity which comprises at least 15 contiguous nucleotides differing by no more than 3 nucleotides from any one of the antisense sequences listed in any one of Tables 3, 4, 9-12, 14, 15, 17, and 18.

[0089] In one embodiment, the double stranded RNAi agents provided herein comprise at least one modified nucleotide.

[0090] In another aspect, the present invention provides double stranded ribonucleic acid (RNAi) agents for inhibiting expression of Factor XII (Hageman Factor) (F12), wherein the double stranded RNAi agent comprises a sense strand and an antisense strand forming a double stranded region, wherein the sense strand comprises at least 15 contiguous nucleotides differing by no more than 3 nucleotides from the nucleotide sequence of SEQ ID NO:9 and the antisense strand comprises at least 15 contiguous nucleotides differing by no more than 3 nucleotides from the nucleotide sequence of SEQ ID NO:10, wherein substantially all of the nucleotides of the sense strand and substantially all of the nucleotides of the antisense strand are modified nucleotides, and wherein the sense strand is conjugated to a ligand attached at the 3′-terminus.

[0091] In certain embodiments, the dsRNA comprises at least one modified nucleotide. In certain embodiments, the dsRNA comprises no more than 4 (i.e., 4, 3, 2, 1, or 0) unmodified nucleotides in the sense strand. In certain embodiments, the dsRNA comprises no more than 4 (i.e., 4, 3, 2, 1, or 0) unmodified nucleotides in the antisense strand. In certain embodiments, the dsRNA comprises no more than 4 (i.e., 4, 3, 2, 1, or 0) unmodified nucleotides in both the sense strand and the antisense strand. In certain embodiments, all of the nucleotides in the sense strand of the dsRNA are modified nucleotides. In certain embodiments, all of the nucleotides in the antisense strand of the dsRNA are modified nucleotides. In certain embodiments, all of the nucleotides in the sense strand of the dsRNA and all of the nucleotides of the antisense strand are modified nucleotides.

[0092] In certain embodiments, the at least one of the modified nucleotides is selected from the group consisting of a deoxy-nucleotide, a 3′-terminal deoxy-thymine (dT) nucleotide, a 2′-O-methyl modified nucleotide, a 2′-fluoro modified nucleotide, a 2′-deoxy-modified nucleotide, a locked nucleotide, an unlocked nucleotide, a conformationally restricted nucleotide, a constrained ethyl nucleotide, an abasic nucleotide, a 2′-amino-modified nucleotide, a 2′-O-allyl-modified nucleotide, 2′-C-alkyl-modified nucleotide, 2′-hydroxly-modified nucleotide, a 2′-methoxyethyl modified nucleotide, a 2′-O-alkyl-modified nucleotide, a morpholino nucleotide, a phosphoramidate, a non-natural base comprising nucleotide, a tetrahydropyran modified nucleotide, a 1,5-anhydrohexitol modified nucleotide, a cyclohexenyl modified nucleotide, a nucleotide comprising a phosphorothioate group, a nucleotide comprising a methylphosphonate group, a nucleotide comprising a 5′-phosphate, and a nucleotide comprising a 5′-phosphate mimic, e.g., a vinyl phosphate.

[0093] In one embodiment, at least one of the modified nucleotides is selected from the group consisting of 2′-O-methyl and 2′fluoro modifications.

[0094] In certain embodiments, the antisesense strand of the double stranded RNAi agents of any of the invention comprise no more than 8 2′-fluoro modifications, no more than 7 2′-fluoro modifications, no more than 6 2′-fluoro modifications, no more than 5 2′-fluoro modifications, no more than 4 2′-fluoro modifications, no more than 3 2′-fluoro modifications, no more than 2 2′-fluoro modifications, no more than 1 2′-fluoro modifications, or no more than 1 2′-fluoro modifications. In other embodiments, the sesense strand of the double stranded RNAi agents of any of the invention comprise no more than 6 2′-fluoro modifications, no more than 5 2′-fluoro modifications, no more than 4 2′-fluoro modifications, no more than 3 2′-fluoro modifications, no more than 2 2′-fluoro modifications, no more than 1 2′-fluoro modifications, or no more than 1 2′-fluoro modifications.

[0095] In one embodiment, the double stranded RNAi agent further comprises at least one phosphorothioate internucleotide linkage. In one embodiment, the double stranded RNAi agent comprises 6-8 phosphorothioate internucleotide linkages.

[0096] The region of complementarity may be at least 17 nucleotides in length, 18 nucleotides in length, 19 nucleotides in length, 20 nucleotides in length, or 21 nucleotides in length.

[0097] In certain embodiment, the region of complementarity may be 19 to 21 nucleotides in length or 21 to 23 nucleotides in length.

[0098] In certain embodiments, each strand of the double stranded RNAi agent is no more than 30 nucleotides in length. In certain embodiments, the double stranded RNAi agent is at least 15 nucleotides in length.

[0099] In certain embodiments, at least one strand of the double stranded RNAi agent comprises a 3′ overhang of at least 1 nucleotide. In certain embodiments, the at least one strand comprises a 3′ overhang of at least 2 nucleotides.

[0100] In certain embodiments, the double stranded RNAi agent further comprises a ligand. In certain embodiments, the ligand is conjugated to the 3′ end of the sense strand of the dsRNA. In certain embodiments, the ligand is an N-acetylgalactosamine (GalNAc) derivative. In certain embodiments, the ligand is one or more GalNAc derivatives attached through a monovalent, a bivalent, or a trivalent branched linker. In certain embodiments the ligand is

[chemical structure]

[0101] In certain embodiments, the dsRNA is conjugated to the ligand awiurivm in the following schematic

[chemical structure]

and, wherein X is O or S.

[0102] In one embodiment, the X is O.

[0103] In one embodiment, the region of complementarity consists of any one of the antisense sequences listed in any one of Tables 3, 4, 9-12, 14, 15, 17, and 18.

[0104] In one embodiment, the dsRNA agent that inhibits the expression of F12 is selected from the group consisting of AD-66170, AD-66173, AD-66176, AD-66125, AD-66172, AD-66167, AD-66165, AD-66168, AD-66163, AD-66116, AD-66126, and AD-67244. In another embodiment, the dsRNA agent that inhibits the expression of F12 is AD-67244.

[0105] In one aspect, the present invention provides cells comprising a double stranded RNAi agent of the invention targeting F12.

[0106] In one aspect, the present invention provides vectors encoding at least one strand of of a double stranded RNAi agent of the invention targeting F12.

[0107] In one aspect, the present invention provides pharmaceutical compositions for inhibiting expression of a F12 gene comprising a double stranded RNAi agent or vector of the invention.

[0108] The pharmaceutical compositions provided herein may be administered in an unbuffered solution, e.g., saline or water, or administered with a buffer solution, e.g., a buffer solution comprising acetate, citrate, prolamine, carbonate, or phosphate or any combination thereof. In one embodiment, the buffer solution is phosphate buffered saline (PBS).

[0109] In one embodiment, the pharmaceutical compositions of the invention comprise a double stranded RNAi agent as described herein, and a lipid formulation.

### BRIEF DESCRIPTION OF THE DRAWINGS

[0110] FIG. 1 is a graph depicting F12 mRNA suppression following a single subcutaneous 1 mg/kg dose or a single 3 mg/kg dose, or a single 1 mg/kg dose or a single 10 mg/kg dose of the indicated agents at 7-10 days post-dose wild-type mice.

[0111] FIG. 2A is a graph depicting the amount of Evans blue dye in the blood of mice administered a single 0 mg/kg, 0.1 mg/kg, 0.3 mg/kg, 1 mg/kg, or 3 mg/kg dose of AD-67244 and captopril at day 7 post-dose.

[0112] FIG. 2B is a graph depicting the amount of Evans blue dye in the intestines of mice administered a single 0 mg/kg, 0.1 mg/kg, 0.3 mg/kg, 1 mg/kg, or 3 mg/kg dose of AD-67244 and captopril at day 7 post-dose.

[0113] FIG. 2C is a graph depicting F12 mRNA suppression in the liver of mice administered a single 0 mg/kg, 0.1 mg/kg, 0.3 mg/kg, 1 mg/kg, or 3 mg/kg dose of AD-67244 and captopril at day 7 post-dose.

[0114] FIG. 2D is a graph depicting the relative permeability of the intestine in mice administered a single 0 mg/kg, 0.1 mg/kg, 0.3 mg/kg, 1 mg/kg, or 3 mg/kg dose of AD-67244 and captopril at day 7 post-dose.

[0115] FIG. 3A is a graph depicting the amount of Evans blue dye in the ears of mice administered a single 0.1 mg/kg, 0.5 mg/kg, or 3 mg/kg dose of AD-67244 in combination with a single 10 mg/kg dose of a dsRNA agent targeting C1-INH at day 7 post-dose. Error bars=standard deviation.

[0116] FIG. 3B is a graph depicting dose-dependent F12 mRNA suppression following a single subcutaneous 0.1 mg/kg, 0.5 mg/kg, or 3 mg/kg dose of AD-67244 in combination with a single 10 mg/kg dose of a dsRNA agent targeting C1-INH at day 7 post-dose.

[0117] FIG. 4 is a graph depicting F12 protein suppression in the plasma of female Cynomolgus monkeys subcutaeoulsy administered a single 3 mg/kg, 1 mg/kg, 0.3 mg/kg, or 0.1 mg/kg dose of AD-67244. The plasma F12 levels shown are the relative F12 protein levels which were normalized to the average pre-dose baseline F12 protein level. Error bars=standard deviation.

[0118] FIG. 5 is a graph depicting F12 protein suppression in the plasma of wild-type mice administered a single 0.5 mg/kg dose of either AD-67244 or AD-74841.

[0119] FIG. 6 is a graph depicting the effect of 5′-end modifications on the in vivo efficacy of the indicated agents.

[0120] FIG. 7A is a graph depicting the fluorescence intensity profile of platelet deposition at the site of electrolytic injury in the vein of mice subcutaneously administered a single 0.3 mg/kg, 0.75 mg/kg, or 10 mg/kg subcutaneous dose of AD-67244 or PBS control. Imaging was performed at day 10 post-dose.

[0121] FIG. 7B is a graph depicting the fluorescence intensity profile of fibrin deposition at the site of electrolytic injury in the vein of mice subcutaneously administered a single 0.3 mg/kg, 0.75 mg/kg, or 10 mg/kg subcutaneous dose of AD-67244 or PBS control. Imaging was performed at day 10 post-dose. The percentage of F12 mRNA remaining in the livers of the mice in each AD-67244 treatment group is also indicated on the right of the graph.

[0122] FIG. 7C is a graph depicting the amount of F12 mRNA, as a ratio to PBS average, remaining in the livers of mice subcutaneously administered a 0.3 mg/kg, 0.75 mg/kg, or 10 mg/kg dose of AD-67244 compared to the control mice injected with PBS used in the electrolytic injury study.

[0123] FIG. 8A is a real time image of platelet and fibrin deposition at the site of electrolytic injury in the vein of a vehicle treated mouse at 1 minute post injury. Fibrin deposits are shown in drak gray and platelet deposits are shown in light gray.

[0124] FIG. 8B is a real time image of platelet and fibrin deposition at the site of electrolytic injury in the vein of a mouse administered a single 10 mg/kg subcutaneous dose of AD-67244 at 1 minute post injury. Fibrin deposits are shown in drak gray and platelet deposits are shown in light gray.

[0125] FIG. 9A is a graph depicting the time to occlusion, in seconds, at the site of FeCl₃ induced injury in the carotid arteries of mice subcutaneously administered a single 10 mg/kg dose of AD-67244 or PBS control.

[0126] FIG. 9B is a graph depicting the amount of F12 mRNA, as a ratio to PBS average, remaining in the livers of mice subcutaneously administered a single 10 mg/kg dose of AD-67244 compared to control mice injected with PBS used in the FeCl₃ induced injury study.

[0127] FIG. 10A is a graph depicting the average hemostatic time at the site of injury in the saphenous veins of mice administered a single subcutaneous 10 mg/kg dose of AD-67244 or PBS control.

[0128] FIG. 10B is a graph depicting the time to occlusion, in seconds, at the site of tail tip transection in mice administered a single subcutaneous 10 mg/kg dose of AD-67244, PBS control, or 300 U/kg of heparin.

### DETAILED DESCRIPTION OF THE INVENTION

[0129] The present invention is based, at least in part, on the surprising discovery that, although agents that target a specific portion of an F12 gene inhibit the formation of a thrombus by inhibiting fibrin and platelet deposition (two molecules required for clotting), such agents do not inhibit hemostasis. Accordingly, such agents are useful for treating subjects having a contact activation pathway-associated disease, such as a thrombophilia without inhibiting hemostasis.

[0130] Accordingly, the present invention provides methods of treating a subject having a contact activation pathway-associated disease using iRNA compositions which effect the RNA-induced silencing complex (RISC)-mediated cleavage of RNA transcripts of a Factor XII (F12) gene. The present invention also provides methods of preventing at least one symptom, such as thrombus formation or an angioedema attack, in a subject having a contact activation pathway-associated disease using iRNA compositions which effect the RNA-induced silencing complex (RISC)-mediated cleavage of RNA transcripts of a Factor XII (F12) gene. In addition, the present invention provides iRNA compositions which effect the RNA-induced silencing complex (RISC)-mediated cleavage of RNA transcripts of a contact activation pathway-associated gene, such as a Factor XII (F12) gene, for use in the methods of the present invention.

[0131] The iRNAs of the invention may include an RNA strand (the antisense strand) having a region which is about 30 nucleotides or less in length, e.g., 15-30, 15-29, 15-28, 15-27, 15-26, 15-25, 15-24, 15-23, 15-22, 15-21, 15-20, 15-19, 15-18, 15-17, 18-30, 18-29, 18-28, 18-27, 18-26, 18-25, 18-24, 18-23, 18-22, 18-21, 18-20, 19-30, 19-29, 19-28, 19-27, 19-26, 19-25, 19-24, 19-23, 19-22, 19-21, 19-20, 20-30, 20-29, 20-28, 20-27, 20-26, 20-25, 20-24, 20-23, 20-22, 20-21, 21-30, 21-29, 21-28, 21-27, 21-26, 21-25, 21-24, 21-23, or 21-22 nucleotides in length, which region is substantially complementary to at least part of an mRNA transcript of a contact activation pathway gene, i.e., the F12 gene.

[0132] In certain embodiments, the iRNAs of the invention include an RNA strand (the antisense strand) which can include longer lengths, for example up to 66 nucleotides, e.g., 36-66, 26-36, 25-36, 31-60, 22-43, 27-53 nucleotides in length with a region of at least 19 contiguous nucleotides that is substantially complementary to at least a part of an mRNA transcript of a contact activation pathway gene, i.e., the F12 gene. These iRNAs with the longer length antisense strands preferably include a second RNA strand (the sense strand) of 20-60 nucleotides in length wherein the sense and antisense strands form a duplex of 18-30 contiguous nucleotides.

[0133] Accordingly, the present invention also provides methods for treating a subject having a disorder that would benefit from inhibiting or reducing the expression of a contact activation pathway gene, e.g., a contact activation pathway-associated disease, such as a thrombophilia or hereditary angioedema (HAE), using iRNA compositions which effect the RNA-induced silencing complex (RISC)-mediated cleavage of RNA transcripts of a contact activation pathway gene.

[0134] Very low dosages of the iRNAs of the invention, in particular, can specifically and efficiently mediate RNA interference (RNAi), resulting in significant inhibition of expression of the corresponding gene (contact activation pathway gene).

[0135] The following detailed description discloses how to make and use compositions containing iRNAs to inhibit the expression of a contact activation pathway gene (i.e., an F12 gene) as well as compositions, uses, and methods for treating subjects having diseases and disorders that would benefit from inhibition and/or reduction of the expression of a contact activation pathway gene (i.e., an F12 gene).

### I. Definitions

[0136] In order that the present invention may be more readily understood, certain terms are first defined. In addition, it should be noted that whenever a value or range of values of a parameter are recited, it is intended that values and ranges intermediate to the recited values are also intended to be part of this invention.

[0137] The articles “a” and “an” are used herein to refer to one or to more than one (i.e., to at least one) of the grammatical object of the article. By way of example, “an element” means one element or more than one element, e.g., a plurality of elements.

[0138] The term “including” is used herein to mean, and is used interchangeably with, the phrase “including but not limited to”.

[0139] The term “or” is used herein to mean, and is used interchangeably with, the term “and/or,” unless context clearly indicates otherwise.

[0140] The term “at least” prior to a number or series of numbers is understood to include the number adjacent to the term “at least”, and all subsequent numbers or integers that could logically be included, as clear from context. For example, the number of nucleotides in a nucleic acid molecule must be an integer. For example, “at least 18 nucleotides of a 21 nucleotide nucleic acid molecule” means that 18, 19, 20, or 21 nucleotides have the indicated property. When at least is present before a series of numbers or a range, it is understood that “at least” can modify each of the numbers in the series or range.

[0141] As used herein, ranges include both the upper and lower limit.

[0142] Unless otherwise specified, the term “contact activation pathway gene” as used herein refers to a KLKB1 gene, an F12 gene, or a KNG1 gene. The contact activation pathway gene may be within a cell, e.g., a cell within a subject, such as a human.

[0143] In one embodiment, the contact activation pathway gene is F12.

[0144] As used herein, “Factor XII (Hageman Factor),” used interchangeably with the terms “coagulation factor XII,” “FXII,” “F12,” active “F12,” and “F12a,” refers to the naturally occurring gene that encodes the zymogen form of F12a. F12 a is an enzyme (EC 3.4.21.38) of the serine protease (or serine endopeptidase) class that cleaves prekallikrein to form kallikrein, which subsequently releases bradykinin from high-molecular weight kininogen and activates F12. The amino acid and complete coding sequences of the reference sequence of the F12 gene may be found in, for example, GenBank Accession No. GI:145275212 (RefSeq Accession No. NM_000505; SEQ ID NO:9; SEQ ID NO:10). Mammalian orthologs of the human F12 gene may be found in, for example, GenBank Accession Nos. GI:544441267 (RefSeq Accession No. XM_005558647, cynomolgus monkey; SEQ ID NO:11 and SEQ ID NO:12); GI:805299477 (RefSeq Accession No. NM_021489, mouse; SEQ ID NO:13 and SEQ ID NO:14); GI:62078740 (RefSeq Accession No. NM_001014006, rat; SEQ ID NO:15 and SEQ ID NO:16).

[0145] Additional examples of F12 mRNA sequences are readily available using publicly available databases, e.g., GenBank, UniProt, and OMIM.

[0146] As used herein, “Kallikrein B, Plasma (Fletcher Factor) 1,” used interchangeably with the terms “Prekallikrein” and “KLKB1,” refers to the naturally occurring gene that encodes the zymogen form of kallikrein, prekallikrein. Plasma prekallikrein is converted to plasma kallikrein (also referred to as active kallikrein) by F12a and proteolytically releases bradykinin from high-molecular weight kininogen and activates F12. Bradykinin is a peptide that enhances vascular permeability and is present in elevated levels in HAE patients. The amino acid and complete coding sequences of the reference sequence of the KLKB1 gene may be found in, for example, GenBank Accession No. GI:78191797 (RefSeq Accession No. NM_000892.3; SEQ ID NO:1; SEQ ID NO:2). Mammalian orthologs of the human KLKB1 gene may be found in, for example, GenBank Accession Nos. GI:544436072 (RefSeq Accession No. XM_005556482, cynomolgus monkey; SEQ ID NO:7 and SEQ ID NO:8); GI:380802470 (RefSeq Accession No. JU329355, rhesus monkey); GI:236465804 (RefSeq Accession No. NM_008455, mouse; SEQ ID NO:3 and SEQ ID NO:4); GI:162138904 (RefSeq Accession No. NM_012725, rat; SEQ ID NO:5 and SEQ ID NO:6).

[0147] Additional examples of KLKB1 mRNA sequences are readily available using publicly available databases, e.g., GenBank, UniProt, and OMIM.

[0148] As used herein, “Kininogen 1,” used interchangeably with the terms “Fitzgerald Factor,” “Williams-Fitzgerald-Flaujeac Factor,” “high-molecular weight kininogen” (“HMWK” or “HK”), “low-molecular weight kininogen” (“LMWK)”, and “KNG1,” refers to the naturally occurring gene that is alternatively spliced to generate HMWK and LMWK. Cleavage of HMWK by active kallikrein releases bradykinin. The amino acid and complete coding sequences of the reference sequence of the KNG1 gene may be found in, for example, GenBank Accession No. GI:262050545 (RefSeq Accession No. NM_001166451; SEQ ID NO:17; SEQ ID NO:18). Mammalian orthologs of the human KNG1 gene may be found in, for example, GenBank Accession Nos. GI:544410550 (RefSeq Accession No. XM_005545463, cynomolgus monkey; SEQ ID NO:19 and SEQ ID NO:20); GI:156231028 (RefSeq Accession No. NM_001102409, mouse; SEQ ID NO:21 and SEQ ID NO:22); GI:80861400 (RefSeq Accession No. NM_012696, rat; SEQ ID NO:23 and SEQ ID NO:23).

[0149] Additional examples of KNG1 mRNA sequences are readily available using publicly available databases, e.g., GenBank, UniProt, and OMIM.

[0150] As used herein, a “subject” is an animal, such as a mammal, including a primate (such as a human, a non-human primate, e.g., a monkey, and a chimpanzee), a non-primate (such as a cow, a pig, a camel, a llama, a horse, a goat, a rabbit, a sheep, a hamster, a guinea pig, a cat, a dog, a rat, a mouse, a horse, and a whale), or a bird (e.g., a duck or a goose). In an embodiment, the subject is a human, such as a human being treated or assessed for a disease, disorder or condition that would benefit from reduction in contact activation pathway gene expression (i.e., F12 gene expression) and/or replication; a human at risk for a disease, disorder or condition that would benefit from reduction in contact activation pathway gene expression; a human having a disease, disorder or condition that would benefit from reduction in contact activation pathway gene expression; and/or human being treated for a disease, disorder or condition that would benefit from reduction in contact activation pathway gene expression, as described herein.

[0151] As used herein, the terms “treating” or “treatment” refer to a beneficial or desired result including, but not limited to, alleviation or amelioration of one or more symptoms associated with contact activation pathway gene expression (i.e., F12 gene expression) and/or contact activation pathway protein production (i.e., F12 protein production), e.g., a thrombophilia, e.g., the formation of a thrombus, the presence of elevated bradykinin, heredity angioedema (HAE), such as hereditary angioedema type I; hereditary angioedema type II; hereditary angioedema type III; or any other hereditary angioedema caused by elevated levels of bradykinin, an angioedema attack, edema swelling of the extremities, face, larynx, upper respiratory tract, abdomen, trunk, and genetials, prodrome; laryngeal swelling; nonpruritic rash; nausea; vomiting; abdominal pain. “Treatment” can also mean prolonging survival as compared to expected survival in the absence of treatment.

[0152] The term “lower” in the context of the level of contact activation pathway gene expression and/or contact activation pathway protein production in a subject or a disease marker or symptom refers to a statistically significant decrease in such level. The decrease can be, for example, at least 10%, at least 15%, at least 20%, at least 25%, at least 30%, at least 35%, at least 40%, at least 45%, at least 50%, at least 55%, at least 60%, at least 65%, at least 70%, at least 75%, at least 80%, at least 85%, at least 90%, at least 95%, or more and is preferably down to a level accepted as within the range of normal for an individual without such disorder.

[0153] As used herein, “prevention” or “preventing,” when used in reference to a disease, disorder or condition thereof, that would benefit from a reduction in expression of a contact activation pathway gene and/or production of a contact activation pathway protein, refers to a reduction in the likelihood that a subject will develop a symptom associated with such a disease, disorder, or condition, or a reduction in the frequency and/or duration of a symptom associated with such a disease, disorder, or condition, e.g., a symptom of contact activation pathway gene expression, such as the formation of a venous thrombus, an arterial thrombus, a cardiac chamber thrombus, a thromboembolism, the presence of elevated bradykinin, an angioedema attack, hereditary angioedema type I; hereditary angioedema type II; hereditary angioedema type III; any other hereditary angioedema caused by elevated levels of bradykinin; edema swelling of the extremities, face, larynx, upper respiratory tract, abdomen, trunk, and genetials, prodrome; laryngeal swelling; nonpruritic rash; nausea; vomiting; abdominal pain. The failure to develop a disease, disorder or condition, or the reduction in the development of a symptom associated with such a disease, disorder or condition (e.g., by at least about 10% on a clinically accepted scale for that disease or disorder), or the exhibition of delayed symptoms delayed (e.g., by days, weeks, months or years) is considered effective prevention.

[0154] As used herein, the term “contact activation pathway-associated disease,” is a disease or disorder that is caused by, or associated with contact activation pathway gene expression (i.e., F12 gene expression) or contact activation pathway protein production (i.e., F12 protein production). The term “contact activation pathway-associated disease” includes a disease, disorder or condition that would benefit from reduction in contact activation pathway gene expression and/or contact activation pathway protein activity. A contact activation pathway-associated disease may be a genetic disorder or an acquired disorder.

[0155] Non-limiting examples of contact activation pathway-associated diseases include, for example, thrombophilia, heredity angioedema (HAE) (such as hereditary angioedema type I; hereditary angioedema type II; hereditary angioedema type III; or any other hereditary angioedema caused by elevated levels of bradykinin), prekallikrein deficiency (inherited or acquired), also known as Fletcher Factor Deficiency, malignant essential hypertension, hypertension, end stage renal disease.

[0156] In one embodiment, the contact activation pathway-associated disease is a thrombophilia. As used herein, the term “thrombophilia,” also referred to as “hypercoagulability” or “a prothrombotic state”, is any disease or disorder associated with an abnormality of blood coagulation that increases the risk of thrombosis and the development of a thrombus. As used herein, the term “thrombosis” refers to the process of local coagulation or clotting of the blood (formation of a “thrombus” or “clot”) in a part of the circulatory system. A thrombophilia may be inherited, acquired, or the result on an environmental condition. Exemplary inherited thrombophilias include inherited antithrombin deficiency, inherited Protein C deficiency, inherited Protein S deficiency, inherited Factor V Leiden thrombophilia, and Prothrombin (Factor II) G20210A. An exemplary acquired thrombophilia includes Antiphospholipid syndrome. Acquired/environmentally acquired thrombophilias may be the result of, for example trauma, fracture, surgery, e.g., orthopedic surgery, oncological surgery, oral contraceptive use, hormone replacement therapy, pregnancy, puerperium, hypercoaguability, previous thrombus, age, immobilization (e.g., more than three days of bed rest), prolonged travel, metabolic syndrome, and air pollution (see, e.g., Previtali, et al. (2011) Blood Transfus 9:120).

[0157] Accordingly, “subjects at risk of forming a thrombus” include surgical patients (e.g., subjects having general surgery, dental surgery, orthopedic surgery (e.g., knee or hip replacement surgery), trauma surgery, oncological surgery); medical patients (e.g., subjects having an immobilizing disease, e.g., subjects having more than three days of bed rest and/or subjects having long-term use of an intravenous catheter; subjects having atrial fibrillation; elderly subjects; subjects having renal impairment; subjects having a prosthetic heart valve; subjects having heart failure; subjects having cancer); pregnant subjects; postpartum subjects; subjects that have previously had a thrombus; subjects undergoing hormone replacement therapy; subjects sitting for long periods of time, such as in a plane or car; and obese subjects.

[0158] In one embodiment, the contact activation pathway-associated disease is hereditary angioedema (HAE). As used herein, “hereditary angioedema,” used interchangeably with the term “HAE,” refers to an autosomal dominant disorder caused by mutation of the C1 inhibitor (C1INH), SERPING1) gene or the coagulation factor XII (F12) gene that causes recurrent edema swelling in patients. Typical symptoms of HAE include severe swelling of the arms, legs, hands, feet, face, tongue and larynx, abdomen, trunk, genitals, nausea, vomiting, abdominal pain, and nonpriuric rash. Elevanted levels of bradykinin peptide are observed during HAE attacks or episodes.

[0159] In another embodiment, the contact activation pathway-associated disease is prekallikrein deficiency.

[0160] In another embodiment, the contact activation pathway-associated disease is malignant essential hypertension.

[0161] In another embodiment, the contact activation pathway-associated disease is hypertension.

[0162] In another embodiment, the contact activation pathway-associated disease is end stage renal disease.

[0163] “Therapeutically effective amount,” as used herein, is intended to include the amount of an RNAi agent that, when administered to a patient for treating a subject having HAE and/or contact activation pathway-associated disease, is sufficient to effect treatment of the disease (e.g., by diminishing, ameliorating or maintaining the existing disease or one or more symptoms of disease). The “therapeutically effective amount” may vary depending on the RNAi agent, how the agent is administered, the disease and its severity and the history, age, weight, family history, genetic makeup, stage of pathological processes mediated by contact activation pathway gene expression, the types of preceding or concomitant treatments, if any, and other individual characteristics of the patient to be treated.

[0164] “Prophylactically effective amount,” as used herein, is intended to include the amount of an RNAi agent that, when administered to a subject who does not yet experience or display symptoms of a contact activation pathway-associated disease, but who may be predisposed or at risk, is sufficient to prevent or ameliorate the disease or one or more symptoms of the disease. Ameliorating the disease includes slowing the course of the disease or reducing the severity of later-developing disease. The “prophylactically effective amount” may vary depending on the RNAi agent, how the agent is administered, the degree of risk of disease, and the history, age, weight, family history, genetic makeup, the types of preceding or concomitant treatments, if any, and other individual characteristics of the patient to be treated.

[0165] A “therapeutically-effective amount” or “prophylacticaly effective amount” also includes an amount of an RNAi agent that produces some desired local or systemic effect at a reasonable benefit/risk ratio applicable to any treatment. RNAi agents employed in the methods of the present invention may be administered in a sufficient amount to produce a reasonable benefit/risk ratio applicable to such treatment.

[0166] As used herein, the term “hemostasis” is the process which causes bleeding to stop, meaning to keep blood within a damaged blood vessel (the opposite of hemostasis is hemorrhage). Hemostasis occurs when blood is present outside of the body or a blood vessel and includes 1) vascular spasm, which constricts the damaged vessel to allow less blood to be lost; 2) platelet plug formation (e.g., platelets stick together to form a temporary seal to cover the break in the vessel wall); and 3) coagulation or blood clotting (e.g., reinforcement of the platelet plug with fibrin threads.

[0167] The term “sample,” as used herein, includes a collection of similar fluids, cells, or tissues isolated from a subject, as well as fluids, cells, or tissues present within a subject. Examples of biological fluids include blood, serum and serosal fluids, plasma, cerebrospinal fluid, ocular fluids, lymph, urine, saliva, and the like. Tissue samples may include samples from tissues, organs or localized regions. For example, samples may be derived from particular organs, parts of organs, or fluids or cells within those organs. In certain embodiments, samples may be derived from the liver (e.g., whole liver or certain segments of liver or certain types of cells in the liver, such as, e.g., hepatocytes), the retina or parts of the retina (e.g., retinal pigment epithelium), the central nervous system or parts of the central nervous system (e.g., ventricles or choroid plexus), or the pancreas or certain cells or parts of the pancreas. In some embodiments, a “sample derived from a subject” refers tocerebrospinal fluid obtained from the subject. In preferred embodiments, a “sample derived from a subject” refers to blood or plasma drawn from the subject. In further embodiments, a “sample derived from a subject” refers to liver tissue (or subcomponents thereof) or retinal tissue (or subcomponents thereof) derived from the subject.

[0168] As used herein, “target sequence” refers to a contiguous portion of the nucleotide sequence of an mRNA molecule formed during the transcription of a contact activation pathway gene, including mRNA that is a product of RNA processing of a primary transcription product. In one embodiment, the target portion of the sequence will be at least long enough to serve as a substrate for iRNA-directed cleavage at or near that portion of the nucleotide sequence of an mRNA molecule formed during the transcription of a contact activation pathway gene. In one embodiment, the target sequence is within the protein coding region of the contact activation pathway gene. In another embodiment, the target sequence is within the 3′ UTR of the contact activation pathway gene.

[0169] The target sequence may be from about 9-36 nucleotides in length, e.g., about 15-30 nucleotides in length. For example, the target sequence can be from about 15-30 nucleotides, 15-29, 15-28, 15-27, 15-26, 15-25, 15-24, 15-23, 15-22, 15-21, 15-20, 15-19, 15-18, 15-17, 18-30, 18-29, 18-28, 18-27, 18-26, 18-25, 18-24, 18-23, 18-22, 18-21, 18-20, 19-30, 19-29, 19-28, 19-27, 19-26, 19-25, 19-24, 19-23, 19-22, 19-21, 19-20, 20-30, 20-29, 20-28, 20-27, 20-26, 20-25, 20-24, 20-23, 20-22, 20-21, 21-30, 21-29, 21-28, 21-27, 21-26, 21-25, 21-24, 21-23, or 21-22 nucleotides in length. In some embodiments, the target sequence is about 19 to about 30 nucleotides in length. In other embodiments, the target sequence is about 19 to about 25 nucleotides in length. In still other embodiments, the target sequence is about 19 to about 23 nucleotides in length. In some embodiments, the target sequence is about 21 to about 23 nucleotides in length. Ranges and lengths intermediate to the above recited ranges and lengths are also contemplated to be part of the invention.

[0170] As used herein, the term “strand comprising a sequence” refers to an oligonucleotide comprising a chain of nucleotides that is described by the sequence referred to using the standard nucleotide nomenclature.

[0171] “G,” “C,” “A,” “T” and “U” each generally stand for a nucleotide that contains guanine, cytosine, adenine, thymidine and uracil as a base, respectively. However, it will be understood that the term “ribonucleotide” or “nucleotide” can also refer to a modified nucleotide, as further detailed below, or a surrogate replacement moiety (see, e.g., Table 2). The skilled person is well aware that guanine, cytosine, adenine, and uracil can be replaced by other moieties without substantially altering the base pairing properties of an oligonucleotide comprising a nucleotide bearing such replacement moiety. For example, without limitation, a nucleotide comprising inosine as its base can base pair with nucleotides containing adenine, cytosine, or uracil. Hence, nucleotides containing uracil, guanine, or adenine can be replaced in the nucleotide sequences of dsRNA featured in the invention by a nucleotide containing, for example, inosine. In another example, adenine and cytosine anywhere in the oligonucleotide can be replaced with guanine and uracil, respectively to form G-U Wobble base pairing with the target mRNA. Sequences containing such replacement moieties are suitable for the compositions and methods featured in the invention.

[0172] The terms “iRNA”, “RNAi agent,” “iRNA agent,”, “RNA interference agent” as used interchangeably herein, refer to an agent that contains RNA as that term is defined herein, and which mediates the targeted cleavage of an RNA transcript via an RNA-induced silencing complex (RISC) pathway. iRNA directs the sequence-specific degradation of mRNA through a process known as RNA interference (RNAi). The iRNA modulates, e.g., inhibits, the expression of an F12 gene in a cell, e.g., a cell within a subject, such as a mammalian subject.

[0173] In one embodiment, an RNAi agent of the invention includes a single stranded RNA that interacts with a target RNA sequence, e.g., a contact activation pathway gene, i.e., an F12 target mRNA sequence, to direct the cleavage of the target RNA. Without wishing to be bound by theory it is believed that long double stranded RNA introduced into cells is broken down into siRNA by a Type III endonuclease known as Dicer (Sharp et al. (2001) Genes Dev. 15:485). Dicer, a ribonuclease-III-like enzyme, processes the dsRNA into 19-23 base pair short interfering RNAs with characteristic two base 3′ overhangs (Bernstein, et al., (2001) Nature 409:363). The siRNAs are then incorporated into an RNA-induced silencing complex (RISC) where one or more helicases unwind the siRNA duplex, enabling the complementary antisense strand to guide target recognition (Nykanen, et al., (2001) Cell 107:309). Upon binding to the appropriate target mRNA, one or more endonucleases within the RISC cleave the target to induce silencing (Elbashir, et al., (2001) Genes Dev. 15:188). Thus, in one aspect the invention relates to a single stranded RNA (siRNA) generated within a cell and which promotes the formation of a RISC complex to effect silencing of the target gene, i.e., a contact activation pathway gene. Accordingly, the term “siRNA” is also used herein to refer to an RNAi as described above.

[0174] In another embodiment, the RNAi agent may be a single-stranded siRNA that is introduced into a cell or organism to inhibit a target mRNA. Single-stranded RNAi agents bind to the RISC endonuclease, Argonaute 2, which then cleaves the target mRNA. The single-stranded siRNAs are generally 15-30 nucleotides and are chemically modified. The design and testing of single-stranded siRNAs are described in U.S. Pat. No. 8,101,348 and in Lima et al., (2012) Cell 150:883-894, the entire contents of each of which are hereby incorporated herein by reference. Any of the antisense nucleotide sequences described herein may be used as a single-stranded siRNA as described herein or as chemically modified by the methods described in Lima et al., (2012) Cell 150:883-894.

[0175] In another embodiment, an “iRNA” for use in the compositions, uses, and methods of the invention is a double stranded RNA and is referred to herein as a “double stranded RNAi agent,” “double stranded RNA (dsRNA) molecule,” “dsRNA agent,” or “dsRNA”. The term “dsRNA”, refers to a complex of ribonucleic acid molecules, having a duplex structure comprising two anti-parallel and substantially complementary nucleic acid strands, referred to as having “sense” and “antisense” orientations with respect to a target RNA, i.e., a contact activation pathway gene, i.e., an F12 gene. In some embodiments of the invention, a double stranded RNA (dsRNA) triggers the degradation of a target RNA, e.g., an mRNA, through a post-transcriptional gene-silencing mechanism referred to herein as RNA interference or RNAi.

[0176] In general, the majority of nucleotides of each strand of a dsRNA molecule are ribonucleotides, but as described in detail herein, each or both strands can also include one or more non-ribonucleotides, e.g., a deoxyribonucleotide and/or a modified nucleotide. In addition, as used in this specification, an “RNAi agent” may include ribonucleotides with chemical modifications; an RNAi agent may include substantial modifications at multiple nucleotides. As used herein, the term “modified nucleotide” refers to a nucleotide having, independently, a modified sugar moiety, a modified internucleotide linkage, and/or modified nucleobase. Thus, the term modified nucleotide encompasses substitutions, additions or removal of, e.g., a functional group or atom, to internucleoside linkages, sugar moieties, or nucleobases. The modifications suitable for use in the agents of the invention include all types of modifications disclosed herein or known in the art. Any such modifications, as used in a siRNA type molecule, are encompassed by “RNAi agent” for the purposes of this specification and claims.

[0177] The duplex region may be of any length that permits specific degradation of a desired target RNA through a RISC pathway, and may range from about 9 to 36 base pairs in length, e.g., about 15-30 base pairs in length, for example, about 9, 10, 11, 12, 13, 14, 15, 16, 17, 18, 19, 20, 21, 22, 23, 24, 25, 26, 27, 28, 29, 30, 31, 32, 33, 34, 35, or 36 base pairs in length, such as about 15-30, 15-29, 15-28, 15-27, 15-26, 15-25, 15-24, 15-23, 15-22, 15-21, 15-20, 15-19, 15-18, 15-17, 18-30, 18-29, 18-28, 18-27, 18-26, 18-25, 18-24, 18-23, 18-22, 18-21, 18-20, 19-30, 19-29, 19-28, 19-27, 19-26, 19-25, 19-24, 19-23, 19-22, 19-21, 19-20, 20-30, 20-29, 20-28, 20-27, 20-26, 20-25, 20-24, 20-23, 20-22, 20-21, 21-30, 21-29, 21-28, 21-27, 21-26, 21-25, 21-24, 21-23, or 21-22 base pairs in length. Ranges and lengths intermediate to the above recited ranges and lengths are also contemplated to be part of the invention.

[0178] The two strands forming the duplex structure may be different portions of one larger RNA molecule, or they may be separate RNA molecules. Where the two strands are part of one larger molecule, and therefore are connected by an uninterrupted chain of nucleotides between the 3′-end of one strand and the 5′-end of the respective other strand forming the duplex structure, the connecting RNA chain is referred to as a “hairpin loop.” A hairpin loop can comprise at least one unpaired nucleotide. In some embodiments, the hairpin loop can comprise at least 2, at least 3, at least 4, at least 5, at least 6, at least 7, at least 8, at least 9, at least 10, at least 20, at least 23 or more unpaired nucleotides.

[0179] Where the two substantially complementary strands of a dsRNA are comprised by separate RNA molecules, those molecules need not, but can be covalently connected. Where the two strands are connected covalently by means other than an uninterrupted chain of nucleotides between the 3′-end of one strand and the 5′-end of the respective other strand forming the duplex structure, the connecting structure is referred to as a “linker.” The RNA strands may have the same or a different number of nucleotides. The maximum number of base pairs is the number of nucleotides in the shortest strand of the dsRNA minus any overhangs that are present in the duplex. In addition to the duplex structure, an RNAi may comprise one or more nucleotide overhangs.

[0180] In one embodiment, an RNAi agent of the invention is a dsRNA of 24-30 nucleotides that interacts with a target RNA sequence, e.g., a contact activation pathway gene, i.e., an F12 target mRNA sequence, to direct the cleavage of the target RNA. Without wishing to be bound by theory, long double stranded RNA introduced into cells is broken down into siRNA by a Type III endonuclease known as Dicer (Sharp et al. (2001) Genes Dev. 15:485). Dicer, a ribonuclease-III-like enzyme, processes the dsRNA into 19-23 base pair short interfering RNAs with characteristic two base 3′ overhangs (Bernstein, et al., (2001) Nature 409:363). The siRNAs are then incorporated into an RNA-induced silencing complex (RISC) where one or more helicases unwind the siRNA duplex, enabling the complementary antisense strand to guide target recognition (Nykanen, et al., (2001) Cell 107:309). Upon binding to the appropriate target mRNA, one or more endonucleases within the RISC cleave the target to induce silencing (Elbashir, et al., (2001) Genes Dev. 15:188).

[0181] As used herein, the term “nucleotide overhang” refers to at least one unpaired nucleotide that protrudes from the duplex structure of an iRNA, e.g., a dsRNA. For example, when a 3′-end of one strand of a dsRNA extends beyond the 5′-end of the other strand, or vice versa, there is a nucleotide overhang. A dsRNA can comprise an overhang of at least one nucleotide; alternatively the overhang can comprise at least two nucleotides, at least three nucleotides, at least four nucleotides, at least five nucleotides or more. A nucleotide overhang can comprise or consist of a nucleotide/nucleoside analog, including a deoxynucleotide/nucleoside. The overhang(s) can be on the sense strand, the antisense strand or any combination thereof. Furthermore, the nucleotide(s) of an overhang can be present on the 5′-end, 3′-end or both ends of either an antisense or sense strand of a dsRNA.

[0182] In one embodiment, the antisense strand of a dsRNA has a 1-10 nucleotide, e.g., a 1, 2, 3, 4, 5, 6, 7, 8, 9, or 10 nucleotide, overhang at the 3′-end and/or the 5′-end. In one embodiment, the sense strand of a dsRNA has a 1-10 nucleotide, e.g., a 1, 2, 3, 4, 5, 6, 7, 8, 9, or 10 nucleotide, overhang at the 3′-end and/or the 5′-end. In another embodiment, one or more of the nucleotides in the overhang is replaced with a nucleoside thiophosphate.

[0183] In certain embodiments, the overhang on the sense strand or the antisense strand, or both, can include extended lengths longer than 10 nucleotides, e.g., 1-30 nucleotides, 2-30 nucleotides, 10-30 nucleotides, or 10-15 nucleotides in length. In certain embodiments, an extended overhang is on the sense strand of the duplex. In certain embodiments, an extended overhang is present on the 3′end of the sense strand of the duplex. In certain embodiments, an extended overhang is present on the 5′end of the sense strand of the duplex. In certain embodiments, an extended overhang is on the antisense strand of the duplex. In certain embodiments, an extended overhang is present on the 3′end of the antisense strand of the duplex. In certain embodiments, an extended overhang is present on the 5′end of the antisense strand of the duplex. In certain embodiments, one or more of the nucleotides in the overhang is replaced with a nucleoside thiophosphate. In certain embodiments, the overhang includes a self-complementary portion such that the overhang is capable of forming a hairpin structure that is stable under physiological conditions.

[0184] “Blunt” or “blunt end” means that there are no unpaired nucleotides at that end of the double stranded RNAi agent, i.e., no nucleotide overhang. A “blunt ended” RNAi agent is a dsRNA that is double stranded over its entire length, i.e., no nucleotide overhang at either end of the molecule. The RNAi agents of the invention include RNAi agents with nucleotide overhangs at one end (i.e., agents with one overhang and one blunt end) or with nucleotide overhangs at both ends.

[0185] The term “antisense strand” or “guide strand” refers to the strand of an iRNA, e.g., a dsRNA, which includes a region that is substantially complementary to a target sequence, e.g., a F12 mRNA. As used herein, the term “region of complementarity” refers to the region on the antisense strand that is substantially complementary to a sequence, for example a target sequence, e.g., a contact activation pathway gene nucleotide sequence, as defined herein. Where the region of complementarity is not fully complementary to the target sequence, the mismatches can be in the internal or terminal regions of the molecule. Generally, the most tolerated mismatches are in the terminal regions, e.g., within 5, 4, 3, 2, or 1 nucleotides of the 5′- and/or 3′-terminus of the iRNA. In one embodiment, a double stranded RNAi agent of the invention include a nucleotide mismatch in the antisense strand. In another embodiment, a double stranded RNAi agent of the invention include a nucleotide mismatch in the sense strand. In one embodiment, the nucleotide mismatch is, for example, within 5, 4, 3, 2, or 1 nucleotides from the 3′-terminus of the iRNA. In another embodiment, the nucleotide mismatch is, for example, in the 3′-terminal nucleotide of the iRNA.

[0186] The term “sense strand,” or “passenger strand” as used herein, refers to the strand of an iRNA that includes a region that is substantially complementary to a region of the antisense strand as that term is defined herein.

[0187] As used herein, the term “cleavage region” refers to a region that is located immediately adjacent to the cleavage site. The cleavage site is the site on the target at which cleavage occurs. In some embodiments, the cleavage region comprises three bases on either end of, and immediately adjacent to, the cleavage site. In some embodiments, the cleavage region comprises two bases on either end of, and immediately adjacent to, the cleavage site. In some embodiments, the cleavage site specifically occurs at the site bound by nucleotides 10 and 11 of the antisense strand, and the cleavage region comprises nucleotides 11, 12 and 13.

[0188] As used herein, and unless otherwise indicated, the term “complementary,” when used to describe a first nucleotide sequence in relation to a second nucleotide sequence, refers to the ability of an oligonucleotide or polynucleotide comprising the first nucleotide sequence to hybridize and form a duplex structure under certain conditions with an oligonucleotide or polynucleotide comprising the second nucleotide sequence, as will be understood by the skilled person. Such conditions can, for example, be stringent conditions, where stringent conditions can include: 400 mM NaCl, 40 mM PIPES pH 6.4, 1 mM EDTA, 50° C. or 70° C. for 12-16 hours followed by washing (see, e.g., “Molecular Cloning: A Laboratory Manual, Sambrook, et al. (1989) Cold Spring Harbor Laboratory Press). Other conditions, such as physiologically relevant conditions as can be encountered inside an organism, can apply. The skilled person will be able to determine the set of conditions most appropriate for a test of complementarity of two sequences in accordance with the ultimate application of the hybridized nucleotides.

[0189] Complementary sequences within an iRNA, e.g., within a dsRNA as described herein, include base-pairing of the oligonucleotide or polynucleotide comprising a first nucleotide sequence to an oligonucleotide or polynucleotide comprising a second nucleotide sequence over the entire length of one or both nucleotide sequences. Such sequences can be referred to as “fully complementary” with respect to each other herein. However, where a first sequence is referred to as “substantially complementary” with respect to a second sequence herein, the two sequences can be fully complementary, or they can form one or more, but generally not more than 5, 4, 3 or 2 mismatched base pairs upon hybridization for a duplex up to 30 base pairs, while retaining the ability to hybridize under the conditions most relevant to their ultimate application, e.g., inhibition of gene expression via a RISC pathway. However, where two oligonucleotides are designed to form, upon hybridization, one or more single stranded overhangs, such overhangs shall not be regarded as mismatches with regard to the determination of complementarity. For example, a dsRNA comprising one oligonucleotide 21 nucleotides in length and another oligonucleotide 23 nucleotides in length, wherein the longer oligonucleotide comprises a sequence of 21 nucleotides that is fully complementary to the shorter oligonucleotide, can yet be referred to as “fully complementary” for the purposes described herein.

[0190] “Complementary” sequences, as used herein, can also include, or be formed entirely from, non-Watson-Crick base pairs and/or base pairs formed from non-natural and modified nucleotides, in so far as the above requirements with respect to their ability to hybridize are fulfilled. Such non-Watson-Crick base pairs include, but are not limited to, G:U Wobble or Hoogstein base pairing.

[0191] The terms “complementary,” “fully complementary” and “substantially complementary” herein can be used with respect to the base matching between the sense strand and the antisense strand of a dsRNA, or between the antisense strand of an iRNA agent and a target sequence, as will be understood from the context of their use.

[0192] As used herein, a polynucleotide that is “substantially complementary to at least part of” a messenger RNA (mRNA) refers to a polynucleotide that is substantially complementary to a contiguous portion of the mRNA of interest (e.g., an mRNA encoding a contact activation pathway gene). For example, a polynucleotide is complementary to at least a part of an F12 mRNA if the sequence is substantially complementary to a non-interrupted portion of an mRNA encoding an F12 gene.

[0193] Accordingly, in some embodiments, the sense strand polynucleotides and the antisense polynucleotides disclosed herein are fully complementary to the target contact activation pathway gene sequence.

[0194] In one embodiment, the antisense polynucleotides disclosed herein are fully complementary to the target F12 sequence. In other embodiments, the antisense polynucleotides disclosed herein are substantially complementary to the target F12 sequence and comprise a contiguous nucleotide sequence which is at least about 80% complementary over its entire length to the equivalent region of the nucleotide sequence of SEQ ID Nos:9 or 10, or a fragment of SEQ ID Nos:9 or 10, such as about 85%, about 86%, about 87%, about 88%, about 89%, about 90%, about % 91%, about 92%, about 93%, about 94%, about 95%, about 96%, about 97%, about 98%, or about 99% complementary.

[0195] In other embodiment, the antisense strand polynucleotides are substantially complementary to the target F12 sequence and comprise a contiguous nucleotide sequence which is at least about 80% complementary over its entire length to any one of the sense strand nucleotide sequences in any one of Tables 3, 4, 9-12, 14, 15, 17, and 18, or a fragment of any one of the antisense strand nucleotide sequences in any one of Tables 3, 4, 9-12, 14, 15, 17, and 18, such as about 85%, about 86%, about 87%, about 88%, about 89%, about 90%, about % 91%, about 92%, about 93%, about 94%, about 95%, about 96%, about 97%, about 98%, or about 99% complementary.

[0196] In one embodiment, an RNAi agent of the invention includes a sense strand that is substantially complementary to an antisense polynucleotide which, in turn, is complementary to a target F12 sequence and comprise a contiguous nucleotide sequence which is at least about 80% complementary over its entire length to any one of antisense strand nucleotide sequences in any one ofTables 3, 4, 9-12, 14, 15, 17, and 18, or a fragment of any one of the antisense strand nucleotide sequences in any one of Tables 3, 4, 9-12, 14, 15, 17, and 18, such as about 85%, about 86%, about 87%, about 88%, about 89%, about 90%, about % 91%, about 92%, about 93%, about 94%, about 95%, about 96%, about 97%, about 98%, or about 99% complementary.

[0197] In general, the majority of nucleotides of each strand are ribonucleotides, but as described in detail herein, each or both strands can also include one or more non-ribonucleotides, e.g., a deoxyribonucleotide and/or a modified nucleotide. In addition, an “iRNA” may include ribonucleotides with chemical modifications. Such modifications may include all types of modifications disclosed herein or known in the art. Any such modifications, as used in an iRNA molecule, are encompassed by “iRNA” for the purposes of this specification and claims.

[0198] In one aspect of the invention, an agent for use in the methods and compositions of the invention is a single-stranded antisense RNA molecule that inhibits a target mRNA via an antisense inhibition mechanism. The single-stranded antisense RNA molecule is complementary to a sequence within the target mRNA. The single-stranded antisense oligonucleotides can inhibit translation in a stoichiometric manner by base pairing to the mRNA and physically obstructing the translation machinery, see Dias, N. et al., (2002) Mol Cancer Ther 1:347-355. The single-stranded antisense RNA molecule may be about 15 to about 30 nucleotides in length and have a sequence that is complementary to a target sequence. For example, the single-stranded antisense RNA molecule may comprise a sequence that is at least about 15, 16, 17, 18, 19, 20, or more contiguous nucleotides from any one of the antisense sequences described herein.

### II. Methods of Treating or Preventing Contact Activation Pathway-Associated Diseases

[0199] The present invention provides therapeutic and prophylactic methods for treating a subject having a contact activation pathway-associated disease.

[0200] In one aspect, the present invention provides methods of treating a subject having a contact-activation-associated disease. The methods include administering to a subject having a contact activation pathway gene-associated disease, disorder, and/or condition, or prone to developing, a contact activation pathway gene-associated disease, disorder, and/or condition, a therapeutically effective amount of an iRNA agent targeting an F12 gene, e.g., a dsRNA agent comprising a sense strand and an antisense strand, the antisense strand comprising a region of complementarity which comprises at least 15 contiguous nucleotides differing by no more than 3 nucleotides from the complement of nucleotides 2000-2040 of SEQ ID NO:9, or a pharmaceutical composition comprising such agents. In the therapeutic methods of the invention, administration of the dsRNA agents to the subject does not inhibit hemostasis in the subject and, e.g., decreases platelet deposition in the subject and/or decreases fibrin deposition in the subject.

[0201] The present invention provides dsRNA agents that inhibit the expression of F12 for therapeutic and prophylactic use in a subject having a contact activation pathway-associated disease.

[0202] In one aspect, the present invention provides dsRNA agents that inhibit the expression of F12 for use in treating a subject having a contact-activation-associated disease. The dsRNA agent comprises a sense strand and an antisense strand, the antisense strand comprising a region of complementarity which comprises at least 15 contiguous nucleotides differing by no more than 3 nucleotides from the complement of nucleotides 2000-2040 of SEQ ID NO:9, or a pharmaceutical composition comprising such agents. Administration of the dsRNA agents to the subject does not inhibit hemostasis in the subject and, e.g., decreases platelet deposition in the subject and/or decreases fibrin deposition in the subject.

[0203] Non-limiting examples of contact activation pathway gene-associated diseases include, for example, a thrombophilia, heredity angioedema (HAE) (such as hereditary angioedema type I; hereditary angioedema type II; hereditary angioedema type III; or any other hereditary angioedema caused by elevated levels of bradykinin), prekallikrein deficiency, malignant essential hypertension, hypertension, end stage renal disease, Fletcher Factor Deficiency, edema swelling of the extremities, face, larynx, upper respiratory tract, abdomen, trunk, and genitals, prodrome; laryngeal swelling; nonpruritic rash; nausea; vomiting; abdominal pain.

[0204] In one embodiment, the contact activation pathway gene-associated disease is a thrombophilia. In another embodiment, the contact activation pathway gene-associated disease is HAE. In another embodiment, the contact activation pathway gene-associated disease is prekallikrein deficiency. In another embodiment, the contact activation pathway gene-associated disease is malignant essential hypertension. In another embodiment, the contact activation pathway gene-associated disease is hypertension. In another embodiment, the contact activation pathway gene-associated disease is end stage renal disease. In another embodiment, the contact activation pathway gene-associated disease is Fletcher Factor Deficiency.

[0205] In one aspect, the invention provides methods of preventing at least one symptom in a subject having a contact activation pathway-associated disease, e.g., a thrombophilia, hereditary angioedema (HAE), e.g., a thrombus formation, the presence of elevated bradykinin, edema swelling of the extremities, face, larynx, upper respiratory tract, abdomen, trunk, and genitals, prodrome; laryngeal swelling; nonpruritic rash; nausea; vomiting; abdominal pain. The methods include administering to the subject a prohylactically effective amount of an iRNA agent targeting an F12 gene, e.g. a dsRNA agent comprising a sense strand and an antisense strand, the antisense strand comprising a region of complementarity which comprises at least 15 contiguous nucleotides differing by no more than 3 nucleotides from the complement of nucleotides 2000-2040 of SEQ ID NO:9, or a pharmaceutical composition comprising such agents, thereby preventing at least one symptom in a subject having a contact activation pathway-associated disease. In the prophylactic methods of the invention, administration of the dsRNA agents to the subject, does not inhibit hemostasis in the subject and, e.g., decreases platelet deposition in the subject and/or decreases fibrin deposition in the subject.

[0206] In another aspect, the present invention provides methods of preventing the formation of a thrombus in a subject at risk of forming a thrombus. The methods include administering to the subject a prohylactically effective amount of an iRNA agent targeting an F12 gene, e.g. a dsRNA agent comprising a sense strand and an antisense strand, the antisense strand comprising a region of complementarity which comprises at least 15 contiguous nucleotides differing by no more than 3 nucleotides from the complement of nucleotides 2000-2040 of SEQ ID NO:9, or a pharmaceutical composition comprising such agents, thereby preventing the formation of a thrombus in the subject at risk of forming a thrombus. Administration of the dsRNA agents to the subject at risk of forming a thrombus does not inhibit hemostasis in the subject and, e.g., decreases platelet deposition in the subject and/or decreases fibrin deposition in the subject.

[0207] In one aspect, the invention provides a dsRNA agent that inhibits the expression of F12 for use in preventing at least one symptom in a subject having a contact activation pathway-associated disease, e.g., a thrombophilia, hereditary angioedema (HAE), e.g., a thrombus formation, the presence of elevated bradykinin, edema swelling of the extremities, face, larynx, upper respiratory tract, abdomen, trunk, and genitals, prodrome; laryngeal swelling; nonpruritic rash; nausea; vomiting; abdominal pain. The dsRNA agent comprises a sense strand and an antisense strand, the antisense strand comprising a region of complementarity which comprises at least 15 contiguous nucleotides differing by no more than 3 nucleotides from the complement of nucleotides 2000-2040 of SEQ ID NO:9, or a pharmaceutical composition comprising such agents. Administration of the dsRNA agents to the subject does not inhibit hemostasis in the subject and, e.g., decreases platelet deposition in the subject and/or decreases fibrin deposition in the subject.

[0208] In another aspect, the present invention provides dsRNA agents that inhibit the expression of F12 for use in preventing the formation of a thrombus in a subject at risk of forming a thrombus. The dsRNA agent comprises a sense strand and an antisense strand, the antisense strand comprising a region of complementarity which comprises at least 15 contiguous nucleotides differing by no more than 3 nucleotides from the complement of nucleotides 2000-2040 of SEQ ID NO:9, or a pharmaceutical composition comprising such agents. Administration of the dsRNA agents to the subject does not inhibit hemostasis in the subject and, e.g., decreases platelet deposition in the subject and/or decreases fibrin deposition in the subject.

[0209] “Subjects at risk of forming a thrombus” include surgical patients (e.g., subjects having general surgery, dental surgery, orthopedic surgery (e.g., knee or hip replacement surgery), trauma surgery, oncological sugery); medical patients (e.g., subjects having an immobilizing disease, e.g., subjects having more than three days of bed rest and/or subjects having long-term use of an intravenous catheter; subjects having atrial fibrillation; elderly subjects; subjects having renal impairment; subjects having a prosthetic heart valve; subjects having heart failure; subjects having cancer); pregnant subjects; postpartum subjects; subjects that have previously had a thrombus; subjects undergoing hormone replacement therapy; subjects sitting for long periods of time, such as in a plane or car; and obese subjects.

[0210] Methods to assess hemostasis, platelet deposition, and fibrin deposition are known to one of ordinary skill in the art and may include, for example, thrombin:antithrombin complex levels as a measure of thrombin generation portential, bleeding time, prothrombin time (PT), platelet count, and/or activated partial thromboplastin time (aPTT). Inhibition may be assessed by a decrease in an absolute or relative level of one or more of these variables compared with a control level. The control level may be any type of control level that is utilized in the art, e.g., a pre-dose baseline level, or a level determined from a similar subject, cell, or sample that is untreated or treated with a control (such as, e.g., buffer only control or inactive agent control).

[0211] The present invention also provides therapeutic and prophylactic methods (and uses) which include administering to a subject having a contact activation pathway gene-associated disease, disorder, and/or condition, or prone to developing, a contact activation pathway gene-associated disease, disorder, and/or condition, compositions comprising an iRNA agent (i.e., an iRNA agent targeting an F12 gene, or a combination of an iRNA agent targeting an F12 gene and an iRNA agent targeting a KNG1 gene, or a combination of an iRNA agent targeting a KLKB1 gene and an iRNA agent targeting an F12 gene), or pharmaceutical compositions comprising an iRNA agent (i.e., an iRNA agent targeting an F12 gene, or a combination of an iRNA agent targeting an F12 gene and an iRNA agent targeting a KNG1 gene, or a combination of an iRNA agent targeting a KLKB1 gene and an iRNA agent targeting an F12 gene), or vectors comprising an iRNA (i.e., an iRNA agent targeting an F12 gene, or a combination of an iRNA agent targeting an F12 gene and an iRNA agent targeting a KNG1 gene, or a combination of an iRNA agent targeting a KLKB1 gene and an iRNA agent targeting an F12 gene) of the invention.

[0212] iRNA agents targeting KLKB1 and KNG1 useful in any of the combination therapies and compositions of the invention may be found in U.S. Patent Publication No.: 2018/0100150 and International Publication No. WO 2016/179342, the entire contents of each of which are incorporated herein by reference.

[0213] The methods and uses of the invention are useful for treating a subject having a contact activation pathway gene-associated disease, e.g., a subject that would benefit from reduction in contact activation pathway gene expression and/or contact activation pathway protein production. In one aspect, the present invention provides methods of reducing the level of Factor XII (Hageman Factor) (F12) gene expression in a subject having hereditary angioedema (HAE). In another aspect, the present invention provides methods of reducing the level of F12 protein in a subject with HAE.

[0214] The present invention also provides methods of reducing the level of bradykinin in a subject with contact activation pathway-associated disease, e.g., a thrombophilia or hereditary angioedema. For example, in one embodiment, the invention provides methods of reducing the level of bradykinin in a subject with hereditary angioedema which include administering to the subject a therapeutically effective amount or a prophylactically effective amount of a dsRNA agent of the invention, (i.e., an iRNA agent targeting an F12 gene, or a combination of of an iRNA agent targeting an F12 gene and an iRNA agent targeting a KNG1 gene, or a combination of an iRNA agent targeting a KLKB1 gene and an iRNA agent targeting an F12 gene), or a pharmaceutical composition or vector comprising such agents, or combinations of such agents.

[0215] In one aspect, the present invention provides methods of treating a subject having a contact activation pathway-associated disease, e.g., a thrombophilia, hereditary angioedema type I; hereditary angioedema type II; hereditary angioedema type III; any other hereditary angioedema caused by elevated levels of bradykinin. In one embodiment, the treatment methods and uses of the invention include administering to the subject, e.g., a human, a therapeutically effective amount of an iRNA agent of the invention targeting an F12 gene or a pharmaceutical composition comprising an iRNA agent of the invention targeting an F12 gene or a vector of the invention comprising an iRNA agent targeting an F12 gene.

[0216] In other embodiments, the treatment methods and uses of the invention include administering to the subject, e.g., a human, a therapeutically effective amount of a combination of dsRNA agents of the invention, (i.e., a combination of an iRNA agent targeting an F12 gene, or a combination of an iRNA agent targeting an F12 gene and an iRNA agent targeting a KNG1 gene, or a combination of an iRNA agent targeting a KLKB1 gene and an iRNA agent targeting an F12 gene), or a pharmaceutical composition or vector comprising such agents, or combinations of such agents.

[0217] In another aspect, the present invention provides methods of treating a subject having HAE. In one embodiment, the methods and uses of the invention for treating a subject having HAE include administering to the subject, e.g., a human, a therapeutically effective amount of an iRNA agent of the invention targeting a F12 gene or a pharmaceutical composition comprising an iRNA agent of the invention targeting a F12 gene or a vector of the invention comprising an iRNA agent targeting an F12 gene. In other embodiments, the methods and uses of the invention for treating a subject having HAE include administering to the subject, e.g., a human, a therapeutically effective amount of a combination of dsRNA agents of the invention, (i.e., a combination of an iRNA agent targeting an F12 gene and an iRNA agent targeting a KNG1 gene, or a combination of an iRNA agent targeting a KLKB1 gene and an iRNA agent targeting an F12 gene), or a pharmaceutical composition or vector comprising such agents, or combinations of such agents.

[0218] In another aspect, the present invention provides methods of treating a subject having a thrombophilia. In one embodiment, the methods and uses of the invention for treating a subject having thrombophilia include administering to the subject, e.g., a human, a therapeutically effective amount of an iRNA agent of the invention targeting a F12 gene or a pharmaceutical composition comprising an iRNA agent of the invention targeting a F12 gene or a vector of the invention comprising an iRNA agent targeting an F12 gene. In other embodiments, the methods and uses of the invention for treating a subject having thrombophilia include administering to the subject, e.g., a human, a therapeutically effective amount of a combination of dsRNA agents of the invention, (i.e., a combination of an iRNA agent targeting an F12 gene and an iRNA agent targeting a KNG1 gene, or a combination of an iRNA agent targeting a KLKB1 gene and an iRNA agent targeting an F12 gene), or a pharmaceutical composition or vector comprising such agents, or combinations of such agents.

[0219] In one aspect, the present invention provides methods of preventing an angioedema attack in a subject having HAE. The methods include administering to the subject a prohylactically effective amount of the iRNA agent, e.g. dsRNA, pharmaceutical compositions, or vectors of the invention, thereby preventing the formation of a thrombus in the subject at risk of forming a thrombus. In one embodiment, the prophylactic methods and uses of the invention include administering to the subject, e.g., a human, a prophylactically effective amount of an iRNA agent of the invention targeting an F12 gene or a pharmaceutical composition comprising an iRNA agent of the invention targeting an F12 gene or a vector of the invention comprising an iRNA agent targeting an F12 gene. In other embodiments, the prophylactic methods (and uses) of the invention include administering to the subject, e.g., a human, a prophylactically effective amount of a combination of dsRNA agents of the invention, (i.e., a combination of an iRNA agent targeting an F12 gene and an iRNA agent targeting a KNG1 gene, or a combination of an iRNA agent targeting a KLKB1 gene and an iRNA agent targeting an F12 gene), or a pharmaceutical composition or vector comprising such agents, or combinations of such agents.

[0220] In another aspect, the present invention provides uses of a therapeutically effective amount of an iRNA agent of the invention for treating a subject, e.g., a subject that would benefit from a reduction and/or inhibition of F12 gene expression.

[0221] In one aspect, the present invention provides uses of an iRNA agent, e.g., a dsRNA, of the invention targeting an F12 gene or pharmaceutical composition comprising an iRNA agent targeting an F12 gene in the manufacture of a medicament for treating a subject, e.g., a subject that would benefit from a reduction and/or inhibition of F12 gene expression and/or F12 protein production, such as a subject having a disorder that would benefit from reduction in F12 gene expression, e.g., a contact activation pathway-associated disease.

[0222] In another aspect, the invention provides uses of an iRNA, e.g., a dsRNA, of the invention for preventing at least one symptom in a subject suffering from a disorder that would benefit from a reduction and/or inhibition of F12 gene expression and/or F12 protein production.

[0223] In a further aspect, the present invention provides uses of an iRNA agent of the invention in the manufacture of a medicament for preventing at least one symptom in a subject suffering from a disorder that would benefit from a reduction and/or inhibition of F12 gene expression and/or F12 protein production, such as a contact activation pathway-associated disease.

[0224] In one embodiment, an iRNA agent targeting F12 is administered to a subject having hereditary angioedema (HAE) and/or a contact activation pathway-associated disease such that the expression of a F12 gene, e.g., in a cell, tissue, blood or other tissue or fluid of the subject are reduced by at least about 10%, 11%, 12%, 13%, 14%, 15%, 16%, 17%, 18%, 19%, 20%, 21%, 22%, 23%, 24%, 25%, 26%, 27%, 28%, 29%, 30%, 31%, 32%, 33%, 34%, 35%, 36%, 37%, 38%, 39%, 40%, 41%, 42%, 43%, 44%, 45%, 46%, 47%, 48%, 49%, 50%, 51%, 52%, 53%, 54%, 55%, 56%, 57%, 58%, 59%, 60%, 61%, 62%, 62%, 64%, 65%, 66%, 67%, 68%, 69%, 70%, 71%, 72%, 73%, 74%, 75%, 76%, 77%, 78%, 79%, 80%, 81%, 82%, 83%, 84%, 85%, 86%, 87%, 88%, 89%, 90%, 91%, 92%, 93%, 94%, 95%, 96%, 97%, 98%, or at least about 99% or more when the dsRNA agent is administered to the subject.

[0225] The methods and uses of the invention include administering a composition described herein such that expression of the target F12 gene is decreased, such as for about 1, 2, 3, 4 5, 6, 7, 8, 12, 16, 18, 24, 28, 32, 36, 40, 44, 48, 52, 56, 60, 64, 68, 72, 76, or about 80 hours. In one embodiment, expression of the target F12 gene is decreased for an extended duration, e.g., at least about two, three, four, five, six, seven days or more, e.g., about one week, two weeks, three weeks, or about four weeks or longer.

[0226] Administration of the dsRNA according to the methods and uses of the invention may result in a reduction of the severity, signs, symptoms, and/or markers of such diseases or disorders in a patient with hereditary angioedema (HAE) and/or contact activation pathway-associated disease. By “reduction” in this context is meant a statistically significant decrease in such level. The reduction can be, for example, at least about 5%, 10%, 15%, 20%, 25%, 30%, 35%, 40%, 45%, 50%, 55%, 60%, 65%, 70%, 75%, 80%, 85%, 90%, 95%, or about 100%.

[0227] Efficacy of treatment or prevention of disease can be assessed, for example by measuring disease progression, disease remission, symptom severity, reduction in pain, quality of life, dose of a medication required to sustain a treatment effect, level of a disease marker or any other measurable parameter appropriate for a given disease being treated or targeted for prevention. It is well within the ability of one skilled in the art to monitor efficacy of treatment or prevention by measuring any one of such parameters, or any combination of parameters. For example, efficacy of treatment of HAE may be assessed, for example, by periodic monitoring of HAE symptoms or bradykinin levels. Comparison of the later readings with the initial readings provide a physician an indication of whether the treatment is effective. It is well within the ability of one skilled in the art to monitor efficacy of treatment or prevention by measuring any one of such parameters, or any combination of parameters. In connection with the administration of an iRNA targeting a contact activation pathway gene or pharmaceutical composition thereof, “effective against” a contact activation pathway-associated disease indicates that administration in a clinically appropriate manner results in a beneficial effect for at least a statistically significant fraction of patients, such as improvement of symptoms, a cure, a reduction in disease, extension of life, improvement in quality of life, or other effect generally recognized as positive by medical doctors familiar with treating HAE and/or a contact activation pathway-associated disease and the related causes.

[0228] A treatment or preventive effect is evident when there is a statistically significant improvement in one or more parameters of disease status, or by a failure to worsen or to develop symptoms where they would otherwise be anticipated. As an example, a favorable change of at least 10% in a measurable parameter of disease, and preferably at least 20%, 30%, 40%, 50% or more can be indicative of effective treatment. Efficacy for a given iRNA drug or formulation of that drug can also be judged using an experimental animal model for the given disease as known in the art. When using an experimental animal model, efficacy of treatment is evidenced when a statistically significant reduction in a marker or symptom is observed.

[0229] Subjects can be administered a therapeutic amount of iRNA, such as about 0.01 mg/kg, 0.02 mg/kg, 0.03 mg/kg, 0.04 mg/kg, 0.05 mg/kg, 0.1 mg/kg, 0.15 mg/kg, 0.2 mg/kg, 0.25 mg/kg, 0.3 mg/kg, 0.35 mg/kg, 0.4 mg/kg, 0.45 mg/kg, 0.5 mg/kg, 0.55 mg/kg, 0.6 mg/kg, 0.65 mg/kg, 0.7 mg/kg, 0.75 mg/kg, 0.8 mg/kg, 0.85 mg/kg, 0.9 mg/kg, 0.95 mg/kg, 1.0 mg/kg, 1.1 mg/kg, 1.2 mg/kg, 1.3 mg/kg, 1.4 mg/kg, 1.5 mg/kg, 1.6 mg/kg, 1.7 mg/kg, 1.8 mg/kg, 1.9 mg/kg, 2.0 mg/kg, 2.1 mg/kg, 2.2 mg/kg, 2.3 mg/kg, 2.4 mg/kg, 2.5 mg/kg dsRNA, 2.6 mg/kg dsRNA, 2.7 mg/kg dsRNA, 2.8 mg/kg dsRNA, 2.9 mg/kg dsRNA, 3.0 mg/kg dsRNA, 3.1 mg/kg dsRNA, 3.2 mg/kg dsRNA, 3.3 mg/kg dsRNA, 3.4 mg/kg dsRNA, 3.5 mg/kg dsRNA, 3.6 mg/kg dsRNA, 3.7 mg/kg dsRNA, 3.8 mg/kg dsRNA, 3.9 mg/kg dsRNA, 4.0 mg/kg dsRNA, 4.1 mg/kg dsRNA, 4.2 mg/kg dsRNA, 4.3 mg/kg dsRNA, 4.4 mg/kg dsRNA, 4.5 mg/kg dsRNA, 4.6 mg/kg dsRNA, 4.7 mg/kg dsRNA, 4.8 mg/kg dsRNA, 4.9 mg/kg dsRNA, 5.0 mg/kg dsRNA, 5.1 mg/kg dsRNA, 5.2 mg/kg dsRNA, 5.3 mg/kg dsRNA, 5.4 mg/kg dsRNA, 5.5 mg/kg dsRNA, 5.6 mg/kg dsRNA, 5.7 mg/kg dsRNA, 5.8 mg/kg dsRNA, 5.9 mg/kg dsRNA, 6.0 mg/kg dsRNA, 6.1 mg/kg dsRNA, 6.2 mg/kg dsRNA, 6.3 mg/kg dsRNA, 6.4 mg/kg dsRNA, 6.5 mg/kg dsRNA, 6.6 mg/kg dsRNA, 6.7 mg/kg dsRNA, 6.8 mg/kg dsRNA, 6.9 mg/kg dsRNA, 7.0 mg/kg dsRNA, 7.1 mg/kg dsRNA, 7.2 mg/kg dsRNA, 7.3 mg/kg dsRNA, 7.4 mg/kg dsRNA, 7.5 mg/kg dsRNA, 7.6 mg/kg dsRNA, 7.7 mg/kg dsRNA, 7.8 mg/kg dsRNA, 7.9 mg/kg dsRNA, 8.0 mg/kg dsRNA, 8.1 mg/kg dsRNA, 8.2 mg/kg dsRNA, 8.3 mg/kg dsRNA, 8.4 mg/kg dsRNA, 8.5 mg/kg dsRNA, 8.6 mg/kg dsRNA, 8.7 mg/kg dsRNA, 8.8 mg/kg dsRNA, 8.9 mg/kg dsRNA, 9.0 mg/kg dsRNA, 9.1 mg/kg dsRNA, 9.2 mg/kg dsRNA, 9.3 mg/kg dsRNA, 9.4 mg/kg dsRNA, 9.5 mg/kg dsRNA, 9.6 mg/kg dsRNA, 9.7 mg/kg dsRNA, 9.8 mg/kg dsRNA, 9.9 mg/kg dsRNA, 9.0 mg/kg dsRNA, 10 mg/kg dsRNA, 15 mg/kg dsRNA, 20 mg/kg dsRNA, 25 mg/kg dsRNA, 30 mg/kg dsRNA, 35 mg/kg dsRNA, 40 mg/kg dsRNA, 45 mg/kg dsRNA, or about 50 mg/kg dsRNA. In one embodiment, subjects can be administered 0.5 mg/kg of the dsRNA. Values and ranges intermediate to the recited values are also intended to be part of this invention.

[0230] In certain embodiments, for example, when a composition of the invention comprises a dsRNA as described herein and a lipid, subjects can be administered a therapeutic amount of iRNA, such as about 0.01 mg/kg to about 5 mg/kg, about 0.01 mg/kg to about 10 mg/kg, about 0.05 mg/kg to about 5 mg/kg, about 0.05 mg/kg to about 10 mg/kg, about 0.1 mg/kg to about 5 mg/kg, about 0.1 mg/kg to about 10 mg/kg, about 0.2 mg/kg to about 5 mg/kg, about 0.2 mg/kg to about 10 mg/kg, about 0.3 mg/kg to about 5 mg/kg, about 0.3 mg/kg to about 10 mg/kg, about 0.4 mg/kg to about 5 mg/kg, about 0.4 mg/kg to about 10 mg/kg, about 0.5 mg/kg to about 5 mg/kg, about 0.5 mg/kg to about 10 mg/kg, about 1 mg/kg to about 5 mg/kg, about 1 mg/kg to about 10 mg/kg, about 1.5 mg/kg to about 5 mg/kg, about 1.5 mg/kg to about 10 mg/kg, about 2 mg/kg to about 2.5 mg/kg, about 2 mg/kg to about 10 mg/kg, about 3 mg/kg to about 5 mg/kg, about 3 mg/kg to about 10 mg/kg, about 3.5 mg/kg to about 5 mg/kg, about 4 mg/kg to about 5 mg/kg, about 4.5 mg/kg to about 5 mg/kg, about 4 mg/kg to about 10 mg/kg, about 4.5 mg/kg to about 10 mg/kg, about 5 mg/kg to about 10 mg/kg, about 5.5 mg/kg to about 10 mg/kg, about 6 mg/kg to about 10 mg/kg, about 6.5 mg/kg to about 10 mg/kg, about 7 mg/kg to about 10 mg/kg, about 7.5 mg/kg to about 10 mg/kg, about 8 mg/kg to about 10 mg/kg, about 8.5 mg/kg to about 10 mg/kg, about 9 mg/kg to about 10 mg/kg, or about 9.5 mg/kg to about 10 mg/kg. Values and ranges intermediate to the recited values are also intended to be part of this invention.

[0231] For example, the dsRNA may be administered at a dose of about 0.1, 0.2, 0.3, 0.4, 0.5, 0.6, 0.7, 0.8, 0.9, 1, 1.1, 1.2, 1.3, 1.4, 1.5, 1.6, 1.7, 1.8, 1.9, 2, 2.1, 2.2, 2.3, 2.4, 2.5, 2.6, 2.7, 2.8, 2.9, 3, 3.1, 3.2, 3.3, 3.4, 3.5, 3.6, 3.7, 3.8, 3.9, 4, 4.1, 4.2, 4.3, 4.4, 4.5, 4.6, 4.7, 4.8, 4.9, 5, 5.1, 5.2, 5.3, 5.4, 5.5, 5.6, 5.7, 5.8, 5.9, 6, 6.1, 6.2, 6.3, 6.4, 6.5, 6.6, 6.7, 6.8, 6.9, 7, 7.1, 7.2, 7.3, 7.4, 7.5, 7.6, 7.7, 7.8, 7.9, 8, 8.1, 8.2, 8.3, 8.4, 8.5, 8.6, 8.7, 8.8, 8.9, 9, 9.1, 9.2, 9.3, 9.4, 9.5, 9.6, 9.7, 9.8, 9.9, or about 10 mg/kg. Values and ranges intermediate to the recited values are also intended to be part of this invention.

[0232] In other embodiments, for example, when a composition of the invention comprises a dsRNA as described herein and an N-acetylgalactosamine, subjects can be administered a therapeutic amount of iRNA, such as a dose of about 0.1 to about 50 mg/kg, about 0.25 to about 50 mg/kg, about 0.5 to about 50 mg/kg, about 0.75 to about 50 mg/kg, about 1 to about 50 mg/kg, about 1.5 to about 50 mg/kg, about 2 to about 50 mg/kg, about 2.5 to about 50 mg/kg, about 3 to about 50 mg/kg, about 3.5 to about 50 mg/kg, about 4 to about 50 mg/kg, about 4.5 to about 50 mg/kg, about 5 to about 50 mg/kg, about 7.5 to about 50 mg/kg, about 10 to about 50 mg/kg, about 15 to about 50 mg/kg, about 20 to about 50 mg/kg, about 20 to about 50 mg/kg, about 25 to about 50 mg/kg, about 25 to about 50 mg/kg, about 30 to about 50 mg/kg, about 35 to about 50 mg/kg, about 40 to about 50 mg/kg, about 45 to about 50 mg/kg, about 0.1 to about 45 mg/kg, about 0.25 to about 45 mg/kg, about 0.5 to about 45 mg/kg, about 0.75 to about 45 mg/kg, about 1 to about 45 mg/kg, about 1.5 to about 45 mg/kg, about 2 to about 45 mg/kg, about 2.5 to about 45 mg/kg, about 3 to about 45 mg/kg, about 3.5 to about 45 mg/kg, about 4 to about 45 mg/kg, about 4.5 to about 45 mg/kg, about 5 to about 45 mg/kg, about 7.5 to about 45 mg/kg, about 10 to about 45 mg/kg, about 15 to about 45 mg/kg, about 20 to about 45 mg/kg, about 20 to about 45 mg/kg, about 25 to about 45 mg/kg, about 25 to about 45 mg/kg, about 30 to about 45 mg/kg, about 35 to about 45 mg/kg, about 40 to about 45 mg/kg, about 0.1 to about 40 mg/kg, about 0.25 to about 40 mg/kg, about 0.5 to about 40 mg/kg, about 0.75 to about 40 mg/kg, about 1 to about 40 mg/kg, about 1.5 to about 40 mg/kg, about 2 to about 40 mg/kg, about 2.5 to about 40 mg/kg, about 3 to about 40 mg/kg, about 3.5 to about 40 mg/kg, about 4 to about 40 mg/kg, about 4.5 to about 40 mg/kg, about 5 to about 40 mg/kg, about 7.5 to about 40 mg/kg, about 10 to about 40 mg/kg, about 15 to about 40 mg/kg, about 20 to about 40 mg/kg, about 20 to about 40 mg/kg, about 25 to about 40 mg/kg, about 25 to about 40 mg/kg, about 30 to about 40 mg/kg, about 35 to about 40 mg/kg, about 0.1 to about 30 mg/kg, about 0.25 to about 30 mg/kg, about 0.5 to about 30 mg/kg, about 0.75 to about 30 mg/kg, about 1 to about 30 mg/kg, about 1.5 to about 30 mg/kg, about 2 to about 30 mg/kg, about 2.5 to about 30 mg/kg, about 3 to about 30 mg/kg, about 3.5 to about 30 mg/kg, about 4 to about 30 mg/kg, about 4.5 to about 30 mg/kg, about 5 to about 30 mg/kg, about 7.5 to about 30 mg/kg, about 10 to about 30 mg/kg, about 15 to about 30 mg/kg, about 20 to about 30 mg/kg, about 20 to about 30 mg/kg, about 25 to about 30 mg/kg, about 0.1 to about 20 mg/kg, about 0.25 to about 20 mg/kg, about 0.5 to about 20 mg/kg, about 0.75 to about 20 mg/kg, about 1 to about 20 mg/kg, about 1.5 to about 20 mg/kg, about 2 to about 20 mg/kg, about 2.5 to about 20 mg/kg, about 3 to about 20 mg/kg, about 3.5 to about 20 mg/kg, about 4 to about 20 mg/kg, about 4.5 to about 20 mg/kg, about 5 to about 20 mg/kg, about 7.5 to about 20 mg/kg, about 10 to about 20 mg/kg, or about 15 to about 20 mg/kg. In one embodiment, when a composition of the invention comprises a dsRNA as described herein and an N-acetylgalactosamine, subjects can be administered a therapeutic amount of about 10 to about 30 mg/kg of dsRNA. Values and ranges intermediate to the recited values are also intended to be part of this invention.

[0233] For example, subjects can be administered a therapeutic amount of iRNA, such as about 0.1, 0.2, 0.3, 0.4, 0.5, 0.6, 0.7, 0.8, 0.9, 1, 1.1, 1.2, 1.3, 1.4, 1.5, 1.6, 1.7, 1.8, 1.9, 2, 2.1, 2.2, 2.3, 2.4, 2.5, 2.6, 2.7, 2.8, 2.9, 3, 3.1, 3.2, 3.3, 3.4, 3.5, 3.6, 3.7, 3.8, 3.9, 4, 4.1, 4.2, 4.3, 4.4, 4.5, 4.6, 4.7, 4.8, 4.9, 5, 5.1, 5.2, 5.3, 5.4, 5.5, 5.6, 5.7, 5.8, 5.9, 6, 6.1, 6.2, 6.3, 6.4, 6.5, 6.6, 6.7, 6.8, 6.9, 7, 7.1, 7.2, 7.3, 7.4, 7.5, 7.6, 7.7, 7.8, 7.9, 8, 8.1, 8.2, 8.3, 8.4, 8.5, 8.6, 8.7, 8.8, 8.9, 9, 9.1, 9.2, 9.3, 9.4, 9.5, 9.6, 9.7, 9.8, 9.9, 10, 10.5, 11, 11.5, 12, 12.5, 13, 13.5, 14, 14.5, 15, 15.5, 16, 16.5, 17, 17.5, 18, 18.5, 19, 19.5, 20, 20.5, 21, 21.5, 22, 22.5, 23, 23.5, 24, 24.5, 25, 25.5, 26, 26.5, 27, 27.5, 28, 28.5, 29, 29.5, 30, 31, 32, 33, 34, 34, 35, 36, 37, 38, 39, 40, 41, 42, 43, 44, 45, 46, 47, 48, 49, or about 50 mg/kg. Values and ranges intermediate to the recited values are also intended to be part of this invention.

[0234] In certain embodiments of the invention, for example, when a double stranded RNAi agent includes a modification (e.g., one or more motifs of three identical modifications on three consecutive nucleotides), including one such motif at or near the cleavage site of the agent, six phosphorothioate linkages, and a ligand, such an agent is administered at a dose of about 0.01 to about 0.5 mg/kg, about 0.01 to about 0.4 mg/kg, about 0.01 to about 0.3 mg/kg, about 0.01 to about 0.2 mg/kg, about 0.01 to about 0.1 mg/kg, about 0.01 mg/kg to about 0.09 mg/kg, about 0.01 mg/kg to about 0.08 mg/kg, about 0.01 mg/kg to about 0.07 mg/kg, about 0.01 mg/kg to about 0.06 mg/kg, about 0.01 mg/kg to about 0.05 mg/kg, about 0.02 to about 0.5 mg/kg, about 0.02 to about 0.4 mg/kg, about 0.02 to about 0.3 mg/kg, about 0.02 to about 0.2 mg/kg, about 0.02 to about 0.1 mg/kg, about 0.02 mg/kg to about 0.09 mg/kg, about 0.02 mg/kg to about 0.08 mg/kg, about 0.02 mg/kg to about 0.07 mg/kg, about 0.02 mg/kg to about 0.06 mg/kg, about 0.02 mg/kg to about 0.05 mg/kg, about 0.03 to about 0.5 mg/kg, about 0.03 to about 0.4 mg/kg, about 0.03 to about 0.3 mg/kg, about 0.03 to about 0.2 mg/kg, about 0.03 to about 0.1 mg/kg, about 0.03 mg/kg to about 0.09 mg/kg, about 0.03 mg/kg to about 0.08 mg/kg, about 0.03 mg/kg to about 0.07 mg/kg, about 0.03 mg/kg to about 0.06 mg/kg, about 0.03 mg/kg to about 0.05 mg/kg, about 0.04 to about 0.5 mg/kg, about 0.04 to about 0.4 mg/kg, about 0.04 to about 0.3 mg/kg, about 0.04 to about 0.2 mg/kg, about 0.04 to about 0.1 mg/kg, about 0.04 mg/kg to about 0.09 mg/kg, about 0.04 mg/kg to about 0.08 mg/kg, about 0.04 mg/kg to about 0.07 mg/kg, about 0.04 mg/kg to about 0.06 mg/kg, about 0.05 to about 0.5 mg/kg, about 0.05 to about 0.4 mg/kg, about 0.05 to about 0.3 mg/kg, about 0.05 to about 0.2 mg/kg, about 0.05 to about 0.1 mg/kg, about 0.05 mg/kg to about 0.09 mg/kg, about 0.05 mg/kg to about 0.08 mg/kg, or about 0.05 mg/kg to about 0.07 mg/kg. Values and ranges intermediate to the foregoing recited values are also intended to be part of this invention, e.g., the RNAi agent may be administered to the subject at a dose of about 0.015 mg/kg to about 0.45 mg/kg.

[0235] For example, the RNAi agent, e.g., RNAi agent in a pharmaceutical composition, may be administered at a dose of about 0.01 mg/kg, 0.0125 mg/kg, 0.015 mg/kg, 0.0175 mg/kg, 0.02 mg/kg, 0.0225 mg/kg, 0.025 mg/kg, 0.0275 mg/kg, 0.03 mg/kg, 0.0325 mg/kg, 0.035 mg/kg, 0.0375 mg/kg, 0.04 mg/kg, 0.0425 mg/kg, 0.045 mg/kg, 0.0475 mg/kg, 0.05 mg/kg, 0.0525 mg/kg, 0.055 mg/kg, 0.0575 mg/kg, 0.06 mg/kg, 0.0625 mg/kg, 0.065 mg/kg, 0.0675 mg/kg, 0.07 mg/kg, 0.0725 mg/kg, 0.075 mg/kg, 0.0775 mg/kg, 0.08 mg/kg, 0.0825 mg/kg, 0.085 mg/kg, 0.0875 mg/kg, 0.09 mg/kg, 0.0925 mg/kg, 0.095 mg/kg, 0.0975 mg/kg, 0.1 mg/kg, 0.125 mg/kg, 0.15 mg/kg, 0.175 mg/kg, 0.2 mg/kg, 0.225 mg/kg, 0.25 mg/kg, 0.275 mg/kg, 0.3 mg/kg, 0.325 mg/kg, 0.35 mg/kg, 0.375 mg/kg, 0.4 mg/kg, 0.425 mg/kg, 0.45 mg/kg, 0.475 mg/kg, or about 0.5 mg/kg. Values intermediate to the foregoing recited values are also intended to be part of this invention.

[0236] In some embodiments, the RNAi agent is administered as a fixed dose of between about 100 mg to about 900 mg, e.g., between about 100 mg to about 850 mg, between about 100 mg to about 800 mg, between about 100 mg to about 750 mg, between about 100 mg to about 700 mg, between about 100 mg to about 650 mg, between about 100 mg to about 600 mg, between about 100 mg to about 550 mg, between about 100 mg to about 500 mg, between about 200 mg to about 850 mg, between about 200 mg to about 800 mg, between about 200 mg to about 750 mg, between about 200 mg to about 700 mg, between about 200 mg to about 650 mg, between about 200 mg to about 600 mg, between about 200 mg to about 550 mg, between about 200 mg to about 500 mg, between about 300 mg to about 850 mg, between about 300 mg to about 800 mg, between about 300 mg to about 750 mg, between about 300 mg to about 700 mg, between about 300 mg to about 650 mg, between about 300 mg to about 600 mg, between about 300 mg to about 550 mg, between about 300 mg to about 500 mg, between about 400 mg to about 850 mg, between about 400 mg to about 800 mg, between about 400 mg to about 750 mg, between about 400 mg to about 700 mg, between about 400 mg to about 650 mg, between about 400 mg to about 600 mg, between about 400 mg to about 550 mg, or between about 400 mg to about 500 mg.

[0237] In some embodiments, the RNAi agent is administered as a fixed dose of about 100 mg, about 125 mg, about 150 mg, about 175 mg, 200 mg, about 225 mg, about 250 mg, about 275 mg, about 300 mg, about 325 mg, about 350 mg, about 375 mg, about 400 mg, about 425 mg, about 450 mg, about 475 mg, about 500 mg, about 525 mg, about 550 mg, about 575 mg, about 600 mg, about 625 mg, about 650 mg, about 675 mg, about 700 mg, about 725 mg, about 750 mg, about 775 mg, about 800 mg, about 825 mg, about 850 mg, about 875 mg, or about 900 mg.

[0238] The iRNA can be administered by intravenous infusion over a period of time, such as over a 5, 6, 7, 8, 9, 10, 11, 12, 13, 14, 15, 16, 17, 18, 19, 20, 21, 22, 23, 24, or about a 25 minute period. The administration may be repeated, for example, on a regular basis, such as weekly, biweekly (i.e., every two weeks) for one month, two months, three months, four months or longer. After an initial treatment regimen, the treatments can be administered on a less frequent basis. For example, after administration weekly or biweekly for three months, administration can be repeated once per month, for six months or a year or longer.

[0239] Administration of the iRNA can reduce the presence of contact activation pathway protein (i.e., F12 protein, and KLKB1 protein and/or KNG1 protein) and/or bradykinin levels, e.g., in a cell, tissue, blood, urine or other compartment of the patient by at least about 5%, 6%, 7%, 8%, 9%, 10%, 11%, 12%, 13%, 14%, 15%, 16%, 17%, 18%, 19%, 20%, 21%, 22%, 23%, 24%, 25%, 26%, 27%, 28%, 29%, 30%, 31%, 32%, 33%, 34%, 35%, 36%, 37%, 38%, 39%, 40%, 41%, 42%, 43%, 44%, 45%, 46%, 47%, 48%, 49%, 50%, 51%, 52%, 53%, 54%, 55%, 56%, 57%, 58%, 59%, 60%, 61%, 62%, 63%, 64%, 65%, 66%, 67%, 68%, 69%, 70%, 71%, 72%, 73%, 74%, 75%, 76%, 77%, 78%, 79%, 80%, 81%, 82%, 83%, 84%, 85%, 86%, 87%, 88%, 89%, 90%, 91%, 92%, 93%, 94%, 95%, 96%, 97%, 98%, or at least about 99% or more.

[0240] Before administration of a full dose of the iRNA, patients can be administered a smaller dose, such as a 5% infusion, and monitored for adverse effects, such as an allergic reaction. In another example, the patient can be monitored for unwanted immunostimulatory effects, such as increased cytokine (e.g., TNF-alpha or INF-alpha) levels.

[0241] Owing to the inhibitory effects on contact activation pathway gene expression, a composition according to the invention or a pharmaceutical composition prepared therefrom can enhance the quality of life.

[0242] An iRNA of the invention may be administered in “naked” form, where the modified or unmodified iRNA agent is directly suspended in aqueous or suitable buffer solvent, as a “free iRNA.” A free iRNA is administered in the absence of a pharmaceutical composition. The free iRNA may be in a suitable buffer solution. The buffer solution may comprise acetate, citrate, prolamine, carbonate, or phosphate, or any combination thereof. In one embodiment, the buffer solution is phosphate buffered saline (PBS). The pH and osmolarity of the buffer solution containing the iRNA can be adjusted such that it is suitable for administering to a subject.

[0243] Alternatively, an iRNA of the invention may be administered as a pharmaceutical composition, such as a dsRNA liposomal formulation.

[0244] Subjects that would benefit from a reduction and/or inhibition of contact activation pathway gene expression are those having hereditary angioedema (HAE) and/or a contact activation pathway-associated disease or disorder as described herein.

[0245] Treatment of a subject that would benefit from a reduction and/or inhibition of contact activation pathway gene expression includes therapeutic and prophylactic treatment.

[0246] The invention further provides methods and uses of an iRNA agent or a pharmaceutical composition thereof for treating a subject that would benefit from reduction and/or inhibition of contact activation pathway gene expression, e.g., a subject having a contact activation pathway-associated disease, in combination with other pharmaceuticals and/or other therapeutic methods, e.g., with known pharmaceuticals and/or known therapeutic methods, such as, for example, those which are currently employed for treating these disorders.

[0247] For example, in certain embodiments, an iRNA targeting a contact activation pathway gene is administered in combination with, e.g., an agent useful in treating an contact activation pathway-associated disease as described elsewhere herein. For example, additional therapeutics and therapeutic methods suitable for treating a subject that would benefit from reduction in contact activation pathway gene expression, e.g., a subject having a contact activation pathway-associated disease, include an iRNA agent targeting a different portion of the contact activation pathway gene, an androgen, or a therapeutic agent, e.g., a C1INH replacement protein, a kallikrein inhibitor peptide, a bradkinin B2 receptor antagonist peptide, or other therapeutic agents and/or procedures for treating a contact activation pathway-associated disease or a combination of any of the foregoing. In one embodiment, the additional therapeutic is selected from the group consisting of an androgen, such as danazol or oxandrolone, Berinert®, Cinryze™, Rhuconest®, Ecallantide, Firazyr®, Kalbitor®, and a combination of any of the foregoing.

[0248] In certain embodiments, a first iRNA agent targeting a contact activation pathway gene is administered in combination with a second iRNA agent targeting a different portion of the contact activation pathway gene. For example, the first RNAi agent comprises a first sense strand and a first antisense strand forming a double stranded region, wherein substantially all of the nucleotides of said first sense strand and substantially all of the nucleotides of the first antisense strand are modified nucleotides, wherein said first sense strand is conjugated to a ligand attached at the 3′-terminus, and wherein the ligand is one or more GalNAc derivatives attached through a bivalent or trivalent branched linker; and the second RNAi agent comprises a second sense strand and a second antisense strand forming a double stranded region, wherein substantially all of the nucleotides of the second sense strand and substantially all of the nucleotides of the second antisense strand are modified nucleotides, wherein the second sense strand is conjugated to a ligand attached at the 3′-terminus, and wherein the ligand is one or more GalNAc derivatives attached through a bivalent or trivalent branched linker.

[0249] In one embodiment, all of the nucleotides of the first and second sense strand and/or all of the nucleotides of the first and second antisense strand comprise a modification.

[0250] In one embodiment, the at least one of the modified nucleotides is selected from the group consisting of a 3′-terminal deoxy-thymine (dT) nucleotide, a 2′-O-methyl modified nucleotide, a 2′-fluoro modified nucleotide, a 2′-deoxy-modified nucleotide, a locked nucleotide, an unlocked nucleotide, a conformationally restricted nucleotide, a constrained ethyl nucleotide, an abasic nucleotide, a 2′-amino-modified nucleotide, a 2′-O-allyl-modified nucleotide, 2′-C-alkyl-modified nucleotide, 2′-hydroxly-modified nucleotide, a 2′-methoxyethyl modified nucleotide, a 2′-O-alkyl-modified nucleotide, a morpholino nucleotide, a phosphoramidate, a non-natural base comprising nucleotide, a tetrahydropyran modified nucleotide, a 1,5-anhydrohexitol modified nucleotide, a cyclohexenyl modified nucleotide, a nucleotide comprising a phosphorothioate group, a nucleotide comprising a methylphosphonate group, a nucleotide comprising a 5′-phosphate, and a nucleotide comprising a 5′-phosphate mimic.

[0251] In certain embodiments, a first iRNA agent targeting a contact activation pathway gene is administered in combination with a second iRNA agent targeting a gene that is different from the contact activation pathway gene. For example, the iRNA agent targeting the F12 gene may be administered in combination with an iRNA agent targeting the KLKB1 gene. The first iRNA agent targeting a F12 gene and the second iRNA agent targeting a gene different from the F12 gene, e.g., the KLKB1 gene, may be administered as parts of the same pharmaceutical composition. Alternatively, the first iRNA agent targeting a F12 gene and the second iRNA agent targeting a gene different from the F12 gene, e.g., the KLKB1 gene, may be administered as parts of different pharmaceutical compositions.

[0252] The iRNA agent and an additional therapeutic agent and/or treatment may be administered at the same time and/or in the same combination, e.g., parenterally, or the additional therapeutic agent can be administered as part of a separate composition or at separate times and/or by another method known in the art or described herein.

[0253] The present invention also provides methods of using an iRNA agent of the invention and/or a composition containing an iRNA agent of the invention to reduce and/or inhibit contact activation pathway gene expression (i.e., F12 expression) in a cell. In other aspects, the present invention provides an iRNA of the invention and/or a composition comprising an iRNA of the invention for use in reducing and/or inhibiting contact activation pathway gene expression (i.e., F12 expression) in a cell. In yet other aspects, use of an iRNA of the invention and/or a composition comprising an iRNA of the invention for the manufacture of a medicament for reducing and/or inhibiting contact activation pathway gene expression (i.e., F12 expression) in a cell are provided. In still other aspects, the the present invention provides an iRNA of the invention and/or a composition comprising an iRNA of the invention for use in reducing and/or inhibiting contact activation pathway protein production (i.e., F12 protein production) in a cell. In yet other aspects, use of an iRNA of the invention and/or a composition comprising an iRNA of the invention for the manufacture of a medicament for reducing and/or inhibiting contact activation pathway protein production (i.e., F12 protein production) in a cell are provided. The methods and uses include contacting the cell with an iRNA, e.g., a dsRNA, of the invention and maintaining the cell for a time sufficient to obtain degradation of the mRNA transcript of the contact activation pathway gene, thereby inhibiting expression of the contact activation pathway gene or inhibiting contact activation pathway protein production in the cell.

[0254] Reduction in gene expression can be assessed by any methods known in the art. For example, a reduction in the expression of F12 may be determined by determining the mRNA expression level of F12 using methods routine to one of ordinary skill in the art, e.g., Northern blotting, qRT-PCR, by determining the protein level of F12 using methods routine to one of ordinary skill in the art, such as Western blotting, immunological techniques, flow cytometry methods, ELISA, and/or by determining a biological activity of F12.

[0255] In the methods and uses of the invention the cell may be contacted in vitro or in vivo, i.e., the cell may be within a subject.

[0256] A cell suitable for treatment using the methods of the invention may be any cell that expresses a contact activation pathway gene, e.g., a cell from a subject having hereditary angioedema (HAE) or a cell comprising an expression vector comprising a contact activation pathway gene or portion of a contact activation pathway gene. A cell suitable for use in the methods and uses of the invention may be a mammalian cell, e.g., a primate cell (such as a human cell or a non-human primate cell, e.g., a monkey cell or a chimpanzee cell), a non-primate cell (such as a cow cell, a pig cell, a camel cell, a llama cell, a horse cell, a goat cell, a rabbit cell, a sheep cell, a hamster, a guinea pig cell, a cat cell, a dog cell, a rat cell, a mouse cell, a lion cell, a tiger cell, a bear cell, or a buffalo cell), a bird cell (e.g., a duck cell or a goose cell), or a whale cell. In one embodiment, the cell is a human cell.

[0257] Contact activation pathway gene expression may be inhibited in the cell by at least about 5%, 6%, 7%, 8%, 9%, 10%, 11%, 12%, 13%, 14%, 15%, 16%, 17%, 18%, 19%, 20%, 21%, 22%, 23%, 24%, 25%, 26%, 27%, 28%, 29%, 30%, 31%, 32%, 33%, 34%, 35%, 36%, 37%, 38%, 39%, 40%, 41%, 42%, 43%, 44%, 45%, 46%, 47%, 48%, 49%, 50%, 51%, 52%, 53%, 54%, 55%, 56%, 57%, 58%, 59%, 60%, 61%, 62%, 63%, 64%, 65%, 66%, 67%, 68%, 69%, 70%, 71%, 72%, 73%, 74%, 75%, 76%, 77%, 78%, 79%, 80%, 81%, 82%, 83%, 84%, 85%, 86%, 87%, 88%, 89%, 90%, 91%, 92%, 93%, 94%, 95%, 96%, 97%, 98%, 99%, or about 100%.

[0258] Contact activation pathway protein production may be inhibited in the cell by at least about 5%, 6%, 7%, 8%, 9%, 10%, 11%, 12%, 13%, 14%, 15%, 16%, 17%, 18%, 19%, 20%, 21%, 22%, 23%, 24%, 25%, 26%, 27%, 28%, 29%, 30%, 31%, 32%, 33%, 34%, 35%, 36%, 37%, 38%, 39%, 40%, 41%, 42%, 43%, 44%, 45%, 46%, 47%, 48%, 49%, 50%, 51%, 52%, 53%, 54%, 55%, 56%, 57%, 58%, 59%, 60%, 61%, 62%, 63%, 64%, 65%, 66%, 67%, 68%, 69%, 70%, 71%, 72%, 73%, 74%, 75%, 76%, 77%, 78%, 79%, 80%, 81%, 82%, 83%, 84%, 85%, 86%, 87%, 88%, 89%, 90%, 91%, 92%, 93%, 94%, 95%, 96%, 97%, 98%, 99%, or about 100%.

[0259] The in vivo methods and uses of the invention may include administering to a subject a composition containing an iRNA, where the iRNA includes a nucleotide sequence that is complementary to at least a part of an RNA transcript of the contact activation pathway gene of the mammal to be treated. When the organism to be treated is a human, the composition can be administered by any means known in the art including, but not limited to subcutaneous, intravenous, oral, intraperitoneal, or parenteral routes, including intracranial (e.g., intraventricular, intraparenchymal and intrathecal), intramuscular, transdermal, airway (aerosol), nasal, rectal, and topical (including buccal and sublingual) administration. In certain embodiments, the compositions are administered by subcutaneous or intravenous infusion or injection. In one embodiment, the compositions are administered by subcutaneous injection.

[0260] In some embodiments, the administration is via a depot injection. A depot injection may release the iRNA in a consistent way over a prolonged time period. Thus, a depot injection may reduce the frequency of dosing needed to obtain a desired effect, e.g., a desired inhibition of F12, or a therapeutic or prophylactic effect. A depot injection may also provide more consistent serum concentrations. Depot injections may include subcutaneous injections or intramuscular injections. In preferred embodiments, the depot injection is a subcutaneous injection.

[0261] In some embodiments, the administration is via a pump. The pump may be an external pump or a surgically implanted pump. In certain embodiments, the pump is a subcutaneously implanted osmotic pump. In other embodiments, the pump is an infusion pump. An infusion pump may be used for intravenous, subcutaneous, arterial, or epidural infusions. In preferred embodiments, the infusion pump is a subcutaneous infusion pump. In other embodiments, the pump is a surgically implanted pump that delivers the iRNA to the subject.

[0262] The mode of administration may be chosen based upon whether local or systemic treatment is desired and based upon the area to be treated. The route and site of administration may be chosen to enhance targeting.

[0263] In another aspect, the present invention also provides methods for inhibiting the expression of an F12 gene in a mammal, e.g., a human. The present invention also provides a composition comprising an iRNA, e.g., a dsRNA, that targets an F12 gene in a cell of a mammal for use in inhibiting expression of the F12 gene in the mammal. In another aspect, the present invention provides use of an iRNA, e.g., a dsRNA, that targets an F12 gene in a cell of a mammal in the manufacture of a medicament for inhibiting expression of the F12 gene in the mammal.

[0264] The methods and uses include administering to the mammal, e.g., a human, a composition comprising an iRNA, e.g., a dsRNA, that targets an F12 gene in a cell of the mammal and maintaining the mammal for a time sufficient to obtain degradation of the mRNA transcript of the F12 gene, thereby inhibiting expression of the F12 gene in the mammal.

[0265] Reduction in gene expression can be assessed in peripheral blood sample of the iRNA-administered subject by any methods known it the art, e.g. qRT-PCR, described herein. Reduction in protein production can be assessed by any methods known it the art and by methods, e.g., ELISA or Western blotting, described herein. In one embodiment, a tissue sample serves as the tissue material for monitoring the reduction in contact activation pathway gene and/or protein expression. In another embodiment, a blood sample serves as the tissue material for monitoring the reduction in contact activation pathway gene and/or protein expression.

[0266] In one embodiment, verification of RISC medicated cleavage of target in vivo following administration of iRNA agent is done by performing 5′-RACE or modifications of the protocol as known in the art (Lasham A et al., (2010) Nucleic Acid Res., 38 (3) p-e19) (Zimmermann et al. (2006) Nature 441: 111-4).

### III. Methods For Inhibiting Contact Activation Pathway Gene Expression

[0267] The present invention also provides methods of inhibiting expression of a contact activation pathway gene (i.e.,an F12 gene) in a cell.

[0268] In one embodiment, the invention provides methods for inhibiting expression of an F12 gene in a cell. The methods include contacting a cell with an RNAi agent, e.g., double stranded RNAi agent, in an amount effective to inhibit expression of F12 in the cell, thereby inhibiting expression of F12 in the cell.

[0269] Contacting of a cell with an RNAi agent, e.g., a double stranded RNAi agent, may be done in vitro or in vivo. Contacting a cell in vivo with the RNAi agent includes contacting a cell or group of cells within a subject, e.g., a human subject, with the RNAi agent. Combinations of in vitro and in vivo methods of contacting a cell are also possible. Contacting a cell may be direct or indirect, as discussed above. Furthermore, contacting a cell may be accomplished via a targeting ligand, including any ligand described herein or known in the art. In preferred embodiments, the targeting ligand is a carbohydrate moiety, e.g., a GalNAc₃ ligand, or any other ligand that directs the RNAi agent to a site of interest.

[0270] The term “inhibiting,” as used herein, is used interchangeably with “reducing,” “silencing,” “downregulating”, “suppressing”, and other similar terms, and includes any level of inhibition.

[0271] The phrase “inhibiting expression of a contact activation pathway gene” is intended to refer to inhibition of expression of any contact activation pathway gene (such as, e.g., a mouse contact activation pathway gene, a rat contact activation pathway gene, a monkey contact activation pathway gene, or a human contact activation pathway gene) as well as variants or mutants of a contact activation pathway gene.

[0272] The phrase “inhibiting expression of F12” is intended to refer to inhibition of expression of any F12 gene (such as, e.g., a mouse F12 gene, a rat F12 gene, a monkey F12 gene, or a human F12 gene) as well as variants or mutants of an F12 gene. Thus, the F12 gene may be a wild-type F12 gene, a mutant F12 gene (such as a mutant F12 gene), or a transgenic F12 gene in the context of a genetically manipulated cell, group of cells, or organism.

[0273] “Inhibiting expression of an F12 gene” includes any level of inhibition of an F12 gene, e.g., at least partial suppression of the expression of an F12 gene. The expression of the F12 gene may be assessed based on the level, or the change in the level, of any variable associated with F12 gene expression, e.g., F12 mRNA level, F12 protein level, or the number or extent of amyloid deposits. This level may be assessed in an individual cell or in a group of cells, including, for example, a sample derived from a subject.

[0274] Inhibition may be assessed by a decrease in an absolute or relative level of one or more variables that are associated with contact activation pathway gene expression compared with a control level. The control level may be any type of control level that is utilized in the art, e.g., a pre-dose baseline level, or a level determined from a similar subject, cell, or sample that is untreated or treated with a control (such as, e.g., buffer only control or inactive agent control).

[0275] In some embodiments of the methods of the invention, expression of a contact activation pathway gene (i.e., an F12 gene) is inhibited by at least about 5%, at least about 10%, at least about 15%, at least about 20%, at least about 25%, at least about 30%, at least about 35%,at least about 40%, at least about 45%, at least about 50%, at least about 55%, at least about 60%, at least about 65%, at least about 70%, at least about 75%, at least about 80%, at least about 85%, at least about 90%, at least about 91%, at least about 92%, at least about 93%, at least about 94%. at least about 95%, at least about 96%, at least about 97%, at least about 98%, or at least about 99%.

[0276] Inhibition of the expression of a contact activation pathway gene may be manifested by a reduction of the amount of mRNA expressed by a first cell or group of cells (such cells may be present, for example, in a sample derived from a subject) in which a contact activation pathway gene is transcribed and which has or have been treated (e.g., by contacting the cell or cells with an RNAi agent of the invention, or by administering an RNAi agent of the invention to a subject in which the cells are or were present) such that the expression of a contact activation pathway gene is inhibited, as compared to a second cell or group of cells substantially identical to the first cell or group of cells but which has not or have not been so treated (control cell(s)). In preferred embodiments, the inhibition is assessed by expressing the level of mRNA in treated cells as a percentage of the level of mRNA in control cells, using the following formula:

$$\frac{( mRNA in control cells ) - ( mRNA in treated cells )}{( mRNA in control cells )} \cdot 100 \%$$

[0277] Alternatively, inhibition of the expression of a contact activation pathway gene may be assessed in terms of a reduction of a parameter that is functionally linked to contact activation pathway gene expression, e.g., KLKB1 protein expression, F12 protein expression, KNG1 protein expression, fibrin deposition, thrombus generation, or bradykinin level. Contact activation pathway gene silencing may be determined in any cell expressing a contact activation pathway gene, either constitutively or by genomic engineering, and by any assay known in the art.

[0278] Inhibition of the expression of a contact activation pathway protein may be manifested by a reduction in the level of a contact activation pathway protein that is expressed by a cell or group of cells (e.g., the level of protein expressed in a sample derived from a subject). As explained above, for the assessment of mRNA suppression, the inhibition of protein expression levels in a treated cell or group of cells may similarly be expressed as a percentage of the level of protein in a control cell or group of cells.

[0279] A control cell or group of cells that may be used to assess the inhibition of the expression of a contact activation pathway gene includes a cell or group of cells that has not yet been contacted with an RNAi agent of the invention. For example, the control cell or group of cells may be derived from an individual subject (e.g., a human or animal subject) prior to treatment of the subject with an RNAi agent.

[0280] The level of contact activation pathway mRNA that is expressed by a cell or group of cells, or the level of circulating contact activation pathway mRNA, may be determined using any method known in the art for assessing mRNA expression. In one embodiment, the level of expression of a contact activation pathway gene in a sample is determined by detecting a transcribed polynucleotide, or portion thereof, e.g., mRNA of the F12 gene. RNA may be extracted from cells using RNA extraction techniques including, for example, using acid phenol/guanidine isothiocyanate extraction (RNAzol B; Biogenesis), RNeasy RNA preparation kits (Qiagen) or PAXgene (PreAnalytix, Switzerland). Typical assay formats utilizing ribonucleic acid hybridization include nuclear run-on assays, RT-PCR, RNase protection assays (Melton et al., Nuc. Acids Res. 12:7035), Northern blotting, in situ hybridization, and microarray analysis. Circulating KLKB1 mRNA may be detected using methods the described in PCT/US2012/043584, the entire contents of which are hereby incorporated herein by reference.

[0281] In one embodiment, the level of expression of a contact activation pathway gene is determined using a nucleic acid probe. The term “probe”, as used herein, refers to any molecule that is capable of selectively binding to a specific contact activation pathway gene. Probes can be synthesized by one of skill in the art, or derived from appropriate biological preparations. Probes may be specifically designed to be labeled. Examples of molecules that can be utilized as probes include, but are not limited to, RNA, DNA, proteins, antibodies, and organic molecules.

[0282] Isolated mRNA can be used in hybridization or amplification assays that include, but are not limited to, Southern or Northern analyses, polymerase chain reaction (PCR) analyses and probe arrays. One method for the determination of mRNA levels involves contacting the isolated mRNA with a nucleic acid molecule (probe) that can hybridize to F12 mRNA. In one embodiment, the mRNA is immobilized on a solid surface and contacted with a probe, for example by running the isolated mRNA on an agarose gel and transferring the mRNA from the gel to a membrane, such as nitrocellulose. In an alternative embodiment, the probe(s) are immobilized on a solid surface and the mRNA is contacted with the probe(s), for example, in an Affymetrix gene chip array. A skilled artisan can readily adapt known mRNA detection methods for use in determining the level of contact activation pathway gene mRNA.

[0283] An alternative method for determining the level of expression of a contact activation pathway gene in a sample involves the process of nucleic acid amplification and/or reverse transcriptase (to prepare cDNA) of for example mRNA in the sample, e.g., by RT-PCR (the experimental embodiment set forth in Mullis, 1987, U.S. Pat. No. 4,683,202), ligase chain reaction (Barany (1991) Proc. Natl. Acad. Sci. USA 88:189-193), self sustained sequence replication (Guatelli et al. (1990) Proc. Natl. Acad. Sci. USA 87:1874-1878), transcriptional amplification system (Kwoh et al. (1989) Proc. Natl. Acad. Sci. USA 86:1173-1177), Q-Beta Replicase (Lizardi et al. (1988) Bio/Technology 6:1197), rolling circle replication (Lizardi et al., U.S. Pat. No. 5,854,033) or any other nucleic acid amplification method, followed by the detection of the amplified molecules using techniques well known to those of skill in the art. These detection schemes are especially useful for the detection of nucleic acid molecules if such molecules are present in very low numbers. In particular aspects of the invention, the level of expression of a contact activation pathway gene is determined by quantitative fluorogenic RT-PCR (i.e., the TaqMan™ System).

[0284] The expression levels of a contact activation pathway mRNA may be monitored using a membrane blot (such as used in hybridization analysis such as Northern, Southern, dot, and the like), or microwells, sample tubes, gels, beads or fibers (or any solid support comprising bound nucleic acids). See U.S. Pat. Nos. 5,770,722, 5,874,219, 5,744,305, 5,677,195 and 5,445,934, which are incorporated herein by reference. The determination of F12 expression level may also comprise using nucleic acid probes in solution.

[0285] In preferred embodiments, the level of mRNA expression is assessed using branched DNA (bDNA) assays or real time PCR (qPCR). The use of these methods is described and exemplified in the Examples presented herein.

[0286] The level of contact activation pathway protein expression may be determined using any method known in the art for the measurement of protein levels. Such methods include, for example, electrophoresis, capillary electrophoresis, high performance liquid chromatography (HPLC), thin layer chromatography (TLC), hyperdiffusion chromatography, fluid or gel precipitin reactions, absorption spectroscopy, a colorimetric assays, spectrophotometric assays, flow cytometry, immunodiffusion (single or double), immunoelectrophoresis, Western blotting, radioimmunoassay (RIA), enzyme-linked immunosorbent assays (ELISAs), immunofluorescent assays, electrochemiluminescence assays, and the like.

[0287] In some embodiments, the efficacy of the methods of the invention can be monitored by detecting or monitoring a reduction in a symptom of a contact activation pathway-associated disease, such as reduction in edema swelling of the extremities, face, larynx, upper respiratory tract, abdomen, trunk, and genitals, prodrome; laryngeal swelling; nonpruritic rash; nausea; vomiting; or abdominal pain. These symptoms may be assessed in vitro or in vivo using any method known in the art.

[0288] The term “sample” as used herein refers to a collection of similar fluids, cells, or tissues isolated from a subject, as well as fluids, cells, or tissues present within a subject. Examples of biological fluids include blood, serum and serosal fluids, plasma, lymph, urine, cerebrospinal fluid, saliva, ocular fluids, and the like. Tissue samples may include samples from tissues, organs or localized regions. For example, samples may be derived from particular organs, parts of organs, or fluids or cells within those organis. In certain embodiments, samples may be derived from the liver (e.g., whole liver or certain segments of liver or certain types of cells in the liver, such as, e.g., hepatocytes), the retina or parts of the retina (e.g., retinal pigment epithelium), the central nervous system or parts of the central nervous system (e.g., ventricles or choroid plexus), or the pancreas or certain cells or parts of the pancreas. In preferred embodiments, a “sample derived from a subject” refers to blood or plasma drawn from the subject. In further embodiments, a “sample derived from a subject” refers to liver tissue or retinal tissue derived from the subject.

[0289] In some embodiments of the methods of the invention, the RNAi agent is administered to a subject such that the RNAi agent is delivered to a specific site within the subject. The inhibition of expression of a contact activation pathway gene may be assessed using measurements of the level or change in the level of contact activation pathway gene mRNA or contact activation pathway protein in a sample derived from fluid or tissue from the specific site within the subject. In preferred embodiments, the site is selected from the group consisting of liver, choroid plexus, retina, and pancreas. The site may also be a subsection or subgroup of cells from any one of the aforementioned sites. The site may also include cells that express a particular type of receptor.

### IV. iRNAs of the Invention

[0290] The present invention provides iRNAs which inhibit the expression of a contact activation pathway gene (i.e., an F12 gene). In one embodiment, the iRNA agent includes double stranded ribonucleic acid (dsRNA) molecules for inhibiting the expression of a contact activation pathway gene in a cell, such as a cell within a subject, e.g., a mammal, such as a human having a contact activation pathway-associated disease, e.g., a thrombophilia or hereditary angioedema, or at risk of developing a contact activation pathway-associated disease, e.g., a thrombophilia, or an angioedema attack. The dsRNA includes an antisense strand having a region of complementarity which is complementary to at least a part of an mRNA formed in the expression of a contact activation pathway gene. The region of complementarity is about 30 nucleotides or less in length (e.g., about 30, 29, 28, 27, 26, 25, 24, 23, 22, 21, 20, 19, or 18 nucleotides or less in length). Upon contact with a cell expressing the contact activation pathway gene, the iRNA inhibits the expression of the contact activation pathway gene (e.g., a human, a primate, a non-primate, or a bird contact activation pathway gene) by at least about 10% as assayed by, for example, a PCR or branched DNA (bDNA)-based method, or by a protein-based method, such as by immunofluorescence analysis, using, for example, Western Blotting or flow cytometric techniques.

[0291] A dsRNA includes two RNA strands that are complementary and hybridize to form a duplex structure under conditions in which the dsRNA will be used. One strand of a dsRNA (the antisense strand) includes a region of complementarity that is substantially complementary, and generally fully complementary, to a target sequence. The target sequence can be derived from the sequence of an mRNA formed during the expression of a contact activation pathway gene (i.e., an F12 gene). The other strand (the sense strand) includes a region that is complementary to the antisense strand, such that the two strands hybridize and form a duplex structure when combined under suitable conditions. As described elsewhere herein and as known in the art, the complementary sequences of a dsRNA can also be contained as self-complementary regions of a single nucleic acid molecule, as opposed to being on separate oligonucleotides.

[0292] Generally, the duplex structure is between 15 and 30 base pairs in length, e.g., between, 15-29, 15-28, 15-27, 15-26, 15-25, 15-24, 15-23, 15-22, 15-21, 15-20, 15-19, 15-18, 15-17, 18-30, 18-29, 18-28, 18-27, 18-26, 18-25, 18-24, 18-23, 18-22, 18-21, 18-20, 19-30, 19-29, 19-28, 19-27, 19-26, 19-25, 19-24, 19-23, 19-22, 19-21, 19-20, 20-30, 20-29, 20-28, 20-27, 20-26, 20-25, 20-24, 20-23, 20-22, 20-21, 21-30, 21-29, 21-28, 21-27, 21-26, 21-25, 21-24, 21-23, or 21-22 base pairs in length. Ranges and lengths intermediate to the above recited ranges and lengths are also contemplated to be part of the invention.

[0293] Similarly, the region of complementarity to the target sequence is between 15 and 30 nucleotides in length, e.g., between 15-29, 15-28, 15-27, 15-26, 15-25, 15-24, 15-23, 15-22, 15-21, 15-20, 15-19, 15-18, 15-17, 18-30, 18-29, 18-28, 18-27, 18-26, 18-25, 18-24, 18-23, 18-22, 18-21, 18-20, 19-30, 19-29, 19-28, 19-27, 19-26, 19-25, 19-24, 19-23, 19-22, 19-21, 19-20, 20-30, 20-29, 20-28, 20-27, 20-26, 20-25, 20-24,20-23, 20-22, 20-21, 21-30, 21-29, 21-28, 21-27, 21-26, 21-25, 21-24, 21-23, or 21-22 nucleotides in length. Ranges and lengths intermediate to the above recited ranges and lengths are also contemplated to be part of the invention.

[0294] In some embodiments, the dsRNA is about 15 to about 20 nucleotides in length, or about 25 to about 30 nucleotides in length. In general, the dsRNA is long enough to serve as a substrate for the Dicer enzyme. For example, it is well-known in the art that dsRNAs longer than about 21-23 nucleotides in length may serve as substrates for Dicer. As the ordinarily skilled person will also recognize, the region of an RNA targeted for cleavage will most often be part of a larger RNA molecule, often an mRNA molecule. Where relevant, a “part” of an mRNA target is a contiguous sequence of an mRNA target of sufficient length to allow it to be a substrate for RNAi-directed cleavage (i.e., cleavage through a RISC pathway).

[0295] One of skill in the art will also recognize that the duplex region is a primary functional portion of a dsRNA, e.g., a duplex region of about 9 to 36 base pairs, e.g., about 10-36, 11-36, 12-36, 13-36, 14-36, 15-36, 9-35, 10-35, 11-35, 12-35, 13-35, 14-35, 15-35, 9-34, 10-34, 11-34, 12-34, 13-34, 14-34, 15-34, 9-33, 10-33, 11-33, 12-33, 13-33, 14-33, 15-33, 9-32, 10-32, 11-32, 12-32, 13-32, 14-32, 15-32, 9-31, 10-31, 11-31, 12-31, 13-32, 14-31, 15-31, 15-30, 15-29, 15-28, 15-27, 15-26, 15-25, 15-24, 15-23, 15-22, 15-21, 15-20, 15-19, 15-18, 15-17, 18-30, 18-29, 18-28, 18-27, 18-26, 18-25, 18-24, 18-23, 18-22, 18-21, 18-20, 19-30, 19-29, 19-28, 19-27, 19-26, 19-25, 19-24, 19-23, 19-22, 19-21, 19-20, 20-30, 20-29, 20-28, 20-27, 20-26, 20-25, 20-24, 20-23, 20-22, 20-21, 21-30, 21-29, 21-28, 21-27, 21-26, 21-25, 21-24, 21-23, or 21-22 base pairs. Thus, in one embodiment, to the extent that it becomes processed to a functional duplex, of e.g., 15-30 base pairs, that targets a desired RNA for cleavage, an RNA molecule or complex of RNA molecules having a duplex region greater than 30 base pairs is a dsRNA. Thus, an ordinarily skilled artisan will recognize that in one embodiment, a miRNA is a dsRNA. In another embodiment, a dsRNA is not a naturally occurring miRNA. In another embodiment, an iRNA agent useful to target contact activation pathway gene expression is not generated in the target cell by cleavage of a larger dsRNA.

[0296] A dsRNA as described herein can further include one or more single-stranded nucleotide overhangs e.g., 1, 2, 3, or 4 nucleotides. dsRNAs having at least one nucleotide overhang can have unexpectedly superior inhibitory properties relative to their blunt-ended counterparts. A nucleotide overhang can comprise or consist of a nucleotide/nucleoside analog, including a deoxynucleotide/nucleoside. The overhang(s) can be on the sense strand, the antisense strand or any combination thereof. Furthermore, the nucleotide(s) of an overhang can be present on the 5′-end, 3′-end or both ends of either an antisense or sense strand of a dsRNA.

[0297] A dsRNA can be synthesized by standard methods known in the art as further discussed below, e.g., by use of an automated DNA synthesizer, such as are commercially available from, for example, Biosearch, Applied Biosystems, Inc.

[0298] iRNA compounds of the invention may be prepared using a two-step procedure. First, the individual strands of the double stranded RNA molecule are prepared separately. Then, the component strands are annealed. The individual strands of the siRNA compound can be prepared using solution-phase or solid-phase organic synthesis or both. Organic synthesis offers the advantage that the oligonucleotide strands comprising unnatural or modified nucleotides can be easily prepared. Single-stranded oligonucleotides of the invention can be prepared using solution-phase or solid-phase organic synthesis or both.

[0299] In one aspect, a dsRNA of the invention includes at least two nucleotide sequences, a sense sequence and an anti-sense sequence. The sense strand is selected from the group of sequences provided in any one of Tables 3, 4, 9-12, 14, 15, 17, and 18, and the corresponding antisense strand of the sense strand is selected from the group of sequences of any one of Tables 3, 4, 9-12, 14, 15, 17, and 18.

[0300] In one embodiment, the sense strand is selected from the group of sequences provided in any one of any one of Tables 9, 10, 19C, 19D, 20, 21, 23, 24, 26, and 27, and the corresponding antisense strand of the sense strand is selected from the group of sequences of any one of Tables 9, 10, 19C, 19D, 20, 21, 23, 24, 26, and 27. In this aspect, one of the two sequences is complementary to the other of the two sequences, with one of the sequences being substantially complementary to a sequence of an mRNA generated in the expression of an F12 gene. As such, in this aspect, a dsRNA will include two oligonucleotides, where one oligonucleotide is described as the sense strand in any one of Tables 9, 10, 19C, 19D, 20, 21, 23, 24, 26, and 27, and the second oligonucleotide is described as the corresponding antisense strand of the sense strand in any one of Tables 9, 10, 19C, 19D, 20, 21, 23, 24, 26, and 27. In one embodiment, the substantially complementary sequences of the dsRNA are contained on separate oligonucleotides. In another embodiment, the substantially complementary sequences of the dsRNA are contained on a single oligonucleotide.

[0301] It will be understood that, although some of the sequences in Tables 3, 4, 9-12, 14, 15, 17, and 18 are described as modified and/or conjugated sequences, the RNA of the iRNA of the invention e.g., a dsRNA of the invention, may comprise any one of the sequences set forth in Tables 3, 4, 9-12, 14, 15, 17, and 18 that is un-modified, un-conjugated, and/or modified and/or conjugated differently than described therein.

[0302] The skilled person is well aware that dsRNAs having a duplex structure of about 20 to about 23 base pairs, e.g., 21, base pairs have been hailed as particularly effective in inducing RNA interference (Elbashir et al., EMBO 2001, 20:6877-6888). However, others have found that shorter or longer RNA duplex structures can also be effective (Chu and Rana (2007) RNA 14:1714-1719; Kim et al. (2005) Nat Biotech 23:222-226). In the embodiments described above, by virtue of the nature of the oligonucleotide sequences provided in any one of Tables 3, 4, 9-12, 14, 15, 17, and 18, dsRNAs described herein can include at least one strand of a length of minimally 21 nucleotides. It can be reasonably expected that shorter duplexes having one of the sequences of any one of Tables 3, 4, 9-12, 14, 15, 17, and 18 minus only a few nucleotides on one or both ends can be similarly effective as compared to the dsRNAs described above. Hence, dsRNAs having a sequence of at least 15, 16, 17, 18, 19, 20, or more contiguous nucleotides derived from one of the sequences of any one of Tables 3, 4, 9-12, 14, 15, 17, and 18 and differing in their ability to inhibit the expression of an F12 gene by not more than about 5, 10, 15, 20, 25, or 30% inhibition from a dsRNA comprising the full sequence, are contemplated to be within the scope of the present invention.

[0303] In addition, the RNAs provided in any one of Tables 3, 4, 9-12, 14, 15, 17, and 18 identify a site(s) in an F12 transcript that is susceptible to RISC-mediated cleavage. As such, the present invention further features iRNAs that target within one of these sites. As used herein, an iRNA is said to target within a particular site of an RNA transcript if the iRNA promotes cleavage of the transcript anywhere within that particular site. Such an iRNA will generally include at least about 15 contiguous nucleotides from one of the sequences provided in any one of Tables 3, 4, 9-12, 14, 15, 17, and 18 coupled to additional nucleotide sequences taken from the region contiguous to the selected sequence in the contact activation pathway gene.

[0304] While a target sequence is generally about 15-30 nucleotides in length, there is wide variation in the suitability of particular sequences in this range for directing cleavage of any given target RNA. Various software packages and the guidelines set out herein provide guidance for the identification of optimal target sequences for any given gene target, but an empirical approach can also be taken in which a “window” or “mask” of a given size (as a non-limiting example, 21 nucleotides) is literally or figuratively (including, e.g., in silico) placed on the target RNA sequence to identify sequences in the size range that can serve as target sequences. By moving the sequence “window” progressively one nucleotide upstream or downstream of an initial target sequence location, the next potential target sequence can be identified, until the complete set of possible sequences is identified for any given target size selected. This process, coupled with systematic synthesis and testing of the identified sequences (using assays as described herein or as known in the art) to identify those sequences that perform optimally can identify those RNA sequences that, when targeted with an iRNA agent, mediate the best inhibition of target gene expression. Thus, while the sequences identified, for example, in any one of Tables 3, 4, 9-12, 14, 15, 17, and 18 represent effective target sequences, it is contemplated that further optimization of inhibition efficiency can be achieved by progressively “walking the window” one nucleotide upstream or downstream of the given sequences to identify sequences with equal or better inhibition characteristics.

[0305] Further, it is contemplated that for any sequence identified, e.g., in any one of Tables 3, 4, 9-12, 14, 15, 17, and 18 further optimization could be achieved by systematically either adding or removing nucleotides to generate longer or shorter sequences and testing those sequences generated by walking a window of the longer or shorter size up or down the target RNA from that point. Again, coupling this approach to generating new candidate targets with testing for effectiveness of iRNAs based on those target sequences in an inhibition assay as known in the art and/or as described herein can lead to further improvements in the efficiency of inhibition. Further still, such optimized sequences can be adjusted by, e.g., the introduction of modified nucleotides as described herein or as known in the art, addition or changes in overhang, or other modifications as known in the art and/or discussed herein to further optimize the molecule (e.g., increasing serum stability or circulating half-life, increasing thermal stability, enhancing transmembrane delivery, targeting to a particular location or cell type, increasing interaction with silencing pathway enzymes, increasing release from endosomes) as an expression inhibitor.

[0306] An iRNA as described herein can contain one or more mismatches to the target sequence. In one embodiment, an iRNA as described herein contains no more than 3 mismatches. If the antisense strand of the iRNA contains mismatches to a target sequence, it is preferable that the area of mismatch is not located in the center of the region of complementarity. If the antisense strand of the iRNA contains mismatches to the target sequence, it is preferable that the mismatch be restricted to be within the last 5 nucleotides from either the 5′- or 3′-end of the region of complementarity. For example, for a 23 nucleotide iRNA agent the strand which is complementary to a region of a contact activation pathway gene, generally does not contain any mismatch within the central 13 nucleotides. The methods described herein or methods known in the art can be used to determine whether an iRNA containing a mismatch to a target sequence is effective in inhibiting the expression of a contact activation pathway gene. Consideration of the efficacy of iRNAs with mismatches in inhibiting expression of a contact activation pathway gene is important, especially if the particular region of complementarity in a contact activation pathway gene is known to have polymorphic sequence variation within the population.

### V. Modified iRNAs of the Invention

[0307] In one embodiment, the RNA of the iRNA of the invention e.g., a dsRNA, is un-modified, and does not comprise, e.g., chemical modifications and/or conjugations known in the art and described herein. In another embodiment, the RNA of an iRNA of the invention, e.g., a dsRNA, is chemically modified to enhance stability or other beneficial characteristics. In certain embodiments of the invention, substantially all of the nucleotides of an iRNA of the invention are modified. In other embodiments of the invention, all of the nucleotides of an iRNA of the invention are modified iRNAs of the invention in which “substantially all of the nucleotides are modified” are largely but not wholly modified and can include not more than 5, 4, 3, 2, or 1 unmodified nucleotides. In some embodiments, substantially all of the nucleotides of an iRNA of the invention are modified and the iRNA comprises no more than 8 2′-fluoro modifications (e.g., no more than 7 2′-fluoro modifications, no more than 6 2′-fluoro modifications, no more than 5 2′-fluoro modification, no more than 4 2′-fluoro modifications, no more than 3 2′-fluoro modifications, or no more than 2 2′-fluoro modifications) on the sense strand and no more than 6 2′-fluoro modifications (e.g., no more than 5 2′-fluoro modifications, no more than 4 2′-fluoro modifications, no more than 3 2′-fluoro modifications, or no more than 2 2′-fluoro modifications) on the antisense strand. In other embodiments, all of the nucleotides of an iRNA of the invention are modified and the iRNA comprises no more than 8 2′-fluoro modifications (e.g., no more than 7 2′-fluoro modifications, no more than 6 2′-fluoro modifications, no more than 5 2′-fluoro modification, no more than 4 2′-fluoro modifications, no more than 3 2′-fluoro modifications, or no more than 2 2′-fluoro modifications) on the sense strand and no more than 6 2′-fluoro modifications (e.g., no more than 5 2′-fluoro modifications, no more than 4 2′-fluoro modifications, no more than 3 2′-fluoro modifications, or no more than 2 2′-fluoro modifications) on the antisense strand.

[0308] The nucleic acids featured in the invention can be synthesized and/or modified by methods well established in the art, such as those described in “Current protocols in nucleic acid chemistry,” Beaucage, S. L. et al. (Edrs.), John Wiley & Sons, Inc., New York, NY, USA, which is hereby incorporated herein by reference. Modifications include, for example, end modifications, e.g., 5′-end modifications (phosphorylation, conjugation, inverted linkages) or 3′-end modifications (conjugation, DNA nucleotides, inverted linkages, etc.); base modifications, e.g., replacement with stabilizing bases, destabilizing bases, or bases that base pair with an expanded repertoire of partners, removal of bases (abasic nucleotides), or conjugated bases; sugar modifications (e.g., at the 2′-position or 4′-position) or replacement of the sugar; and/or backbone modifications, including modification or replacement of the phosphodiester linkages. Specific examples of iRNA compounds useful in the embodiments described herein include, but are not limited to RNAs containing modified backbones or no natural internucleoside linkages. RNAs having modified backbones include, among others, those that do not have a phosphorus atom in the backbone. For the purposes of this specification, and as sometimes referenced in the art, modified RNAs that do not have a phosphorus atom in their internucleoside backbone can also be considered to be oligonucleosides. In some embodiments, a modified iRNA will have a phosphorus atom in its internucleoside backbone.

[0309] Modified RNA backbones include, for example, phosphorothioates, chiral phosphorothioates, phosphorodithioates, phosphotriesters, aminoalkylphosphotriesters, methyl and other alkyl phosphonates including 3′-alkylene phosphonates and chiral phosphonates, phosphinates, phosphoramidates including 3′-amino phosphoramidate and aminoalkylphosphoramidates, thionophosphoramidates, thionoalkylphosphonates, thionoalkylphosphotriesters, and boranophosphates having normal 3′-5′ linkages, 2′-5′-linked analogs of these, and those having inverted polarity wherein the adjacent pairs of nucleoside units are linked 3′-5′ to 5′-3′ or 2′-5′ to 5′-2′. Various salts, mixed salts and free acid forms are also included.

[0310] Representative U.S. patents that teach the preparation of the above phosphorus-containing linkages include, but are not limited to, U.S. Pat. Nos. 3,687,808; 4,469,863; 4,476,301; 5,023,243; 5,177,195; 5,188,897; 5,264,423; 5,276,019; 5,278,302; 5,286,717; 5,321,131; 5,399,676; 5,405,939; 5,453,496; 5,455,233; 5,466,677; 5,476,925; 5,519,126; 5,536,821; 5,541,316; 5,550,111; 5,563,253; 5,571,799; 5,587,361; 5,625,050; 6,028,188; 6,124,445; 6,160,109; 6,169,170; 6,172,209; 6,239,265; 6,277,603; 6,326,199; 6,346,614; 6,444,423; 6,531,590; 6,534,639; 6,608,035; 6,683,167; 6,858,715; 6,867,294; 6,878,805; 7,015,315; 7,041,816; 7,273,933; 7,321,029; and U.S. Pat. RE39464, the entire contents of each of which are hereby incorporated herein by reference.

[0311] Modified RNA backbones that do not include a phosphorus atom therein have backbones that are formed by short chain alkyl or cycloalkyl internucleoside linkages, mixed heteroatoms and alkyl or cycloalkyl internucleoside linkages, or one or more short chain heteroatomic or heterocyclic internucleoside linkages. These include those having morpholino linkages (formed in part from the sugar portion of a nucleoside); siloxane backbones; sulfide, sulfoxide and sulfone backbones; formacetyl and thioformacetyl backbones; methylene formacetyl and thioformacetyl backbones; alkene containing backbones; sulfamate backbones; methyleneimino and methylenehydrazino backbones; sulfonate and sulfonamide backbones; amide backbones; and others having mixed N, O, S and CH₂ component parts.

[0312] Representative U.S. patents that teach the preparation of the above oligonucleosides include, but are not limited to, U.S. Pat. Nos. 5,034,506; 5,166,315; 5,185,444; 5,214,134; 5,216,141; 5,235,033; 5,64,562; 5,264,564; 5,405,938; 5,434,257; 5,466,677; 5,470,967; 5,489,677; 5,541,307; 5,561,225; 5,596,086; 5,602,240; 5,608,046; 5,610,289; 5,618,704; 5,623,070; 5,663,312; 5,633,360; 5,677,437; and, 5,677,439, the entire contents of each of which are hereby incorporated herein by reference.

[0313] In other embodiments, suitable RNA mimetics are contemplated for use in iRNAs, in which both the sugar and the internucleoside linkage, i.e., the backbone, of the nucleotide units are replaced with novel groups. The base units are maintained for hybridization with an appropriate nucleic acid target compound. One such oligomeric compound, an RNA mimetic that has been shown to have excellent hybridization properties, is referred to as a peptide nucleic acid (PNA). In PNA compounds, the sugar backbone of an RNA is replaced with an amide containing backbone, in particular an aminoethylglycine backbone. The nucleobases are retained and are bound directly or indirectly to aza nitrogen atoms of the amide portion of the backbone. Representative U.S. patents that teach the preparation of PNA compounds include, but are not limited to, U.S. Pat. Nos. 5,539,082; 5,714,331; and 5,719,262, the entire contents of each of which are hereby incorporated herein by reference. Additional PNA compounds suitable for use in the iRNAs of the invention are described in, for example, in Nielsen et al., Science, 1991, 254, 1497-1500.

[0314] Some embodiments featured in the invention include RNAs with phosphorothioate backbones and oligonucleosides with heteroatom backbones, and in particular —CH₂—NH—CH₂—, —CH₂—N(CH₃)—O—CH₂-[known as a methylene (methylimino) or MMI backbone], —CH₂—O—N(CH₃)—CH₂—, —CH₂—N(CH₃)—N(CH₃)—CH₂- and —N(CH₃)—CH₂—CH₂-[wherein the native phosphodiester backbone is represented as —O—PO—CH₂—] of the above-referenced U.S. Pat. No. 5,489,677, and the amide backbones of the above-referenced U.S. Pat. No. 5,602,240. In some embodiments, the RNAs featured herein have morpholino backbone structures of the above-referenced U.S. Pat. No. 5,034,506.

[0315] Modified RNAs can also contain one or more substituted sugar moieties. The iRNAs, e.g., dsRNAs, featured herein can include one of the following at the 2′-position: OH; F; O-, S-, or N-alkyl; O—, S-, or N-alkenyl; O—, S- or N-alkynyl; or O-alkyl-0-alkyl, wherein the alkyl, alkenyl and alkynyl can be substituted or unsubstituted C₁ to C₁₀ alkyl or C₂ to C₁₀ alkenyl and alkynyl. Exemplary suitable modifications include O[(CH₂)ₙO]ₙCH₃, O(CH₂)₋ₙOCH₃, O(CH₂)ₙNH₂, O(CH₂)ₙCH₃, O(CH₂)ₙONH₂, and O(CH₂)ₙON[(CH₂)ₙCH₃)]₂, where n and m are from 1 to about 10. In other embodiments, dsRNAs include one of the following at the 2′ position: C₁ to C₁₀ lower alkyl, substituted lower alkyl, alkaryl, aralkyl, O-alkaryl or O-aralkyl, SH, SCH₃, OCN, Cl, Br, CN, CF₃, OCF₃, SOCH₃, SO₂CH₃, ONO₂, NO₂, N₃, NH₂, heterocycloalkyl, heterocycloalkaryl, aminoalkylamino, polyalkylamino, substituted silyl, an RNA cleaving group, a reporter group, an intercalator, a group for improving the pharmacokinetic properties of an iRNA, or a group for improving the pharmacodynamic properties of an iRNA, and other substituents having similar properties. In some embodiments, the modification includes a 2′-methoxyethoxy (2′-O—CH₂CH₂OCH₃, also known as 2′-O-(2-methoxyethyl) or 2′-MOE) (Martin et al., Helv. Chim. Acta, 1995, 78:486-504) i.e., an alkoxy-alkoxy group. Another exemplary modification is 2′-dimethylaminooxyethoxy, i.e., a O(CH₂)₂ON(CH₃)₂ group, also known as 2′-DMAOE, as described in examples herein below, and 2′-dimethylaminoethoxyethoxy (also known in the art as 2′-O-dimethylaminoethoxyethyl or 2′-DMAEOE), i.e., 2′-O—CH₂—O—CH₂—N(CH₂)₂.

[0316] Other modifications include 2′-methoxy (2′-OCH₃), 2′-aminopropoxy (2′-OCH₂CH₂CH₂NH₂) and 2′-fluoro (2′-F). Similar modifications can also be made at other positions on the RNA of an iRNA, particularly the 3′ position of the sugar on the 3′ terminal nucleotide or in 2′-5′ linked dsRNAs and the 5′ position of 5′ terminal nucleotide. iRNAs can also have sugar mimetics such as cyclobutyl moieties in place of the pentofuranosyl sugar. Representative U.S. patents that teach the preparation of such modified sugar structures include, but are not limited to, U.S. Pat. Nos. 4,981,957; 5,118,800; 5,319,080; 5,359,044; 5,393,878; 5,446,137; 5,466,786; 5,514,785; 5,519,134; 5,567,811; 5,576,427; 5,591,722; 5,597,909; 5,610,300; 5,627,053; 5,639,873; 5,646,265; 5,658,873; 5,670,633; and 5,700,920, certain of which are commonly owned with the instant application. The entire contents of each of the foregoing are hereby incorporated herein by reference.

[0317] The RNA of an iRNA can also include nucleobase (often referred to in the art simply as “base”) modifications or substitutions. As used herein, “unmodified” or “natural” nucleobases include the purine bases adenine (A) and guanine (G), and the pyrimidine bases thymine (T), cytosine (C) and uracil (U). Modified nucleobases include other synthetic and natural nucleobases such as deoxy-thymine (dT), 5-methylcytosine (5-me-C), 5-hydroxymethyl cytosine, xanthine, hypoxanthine, 2-aminoadenine, 6-methyl and other alkyl derivatives of adenine and guanine, 2-propyl and other alkyl derivatives of adenine and guanine, 2-thiouracil, 2-thiothymine and 2-thiocytosine, 5-halouracil and cytosine, 5-propynyl uracil and cytosine, 6-azo uracil, cytosine and thymine, 5-uracil (pseudouracil), 4-thiouracil, 8-halo, 8-amino, 8-thiol, 8-thioalkyl, 8-hydroxyl anal other 8-substituted adenines and guanines, 5-halo, particularly 5-bromo, 5-trifluoromethyl and other 5-substituted uracils and cytosines, 7-methylguanine and 7-methyladenine, 8-azaguanine and 8-azaadenine, 7-deazaguanine and 7-daazaadenine and 3-deazaguanine and 3-deazaadenine. Further nucleobases include those disclosed in U.S. Pat. No. 3,687,808, those disclosed in Modified Nucleosides in Biochemistry, Biotechnology and Medicine, Herdewijn, P. ed. Wiley-VCH, 2008; those disclosed in The Concise Encyclopedia Of Polymer Science And Engineering, pages 858-859, Kroschwitz, J. L, ed. John Wiley & Sons, 1990, these disclosed by Englisch et al., Angewandte Chemie, International Edition, 1991, 30, 613, and those disclosed by Sanghvi, Y S., Chapter 15, dsRNA Research and Applications, pages 289-302, Crooke, S. T. and Lebleu, B., Ed., CRC Press, 1993. Certain of these nucleobases are particularly useful for increasing the binding affinity of the oligomeric compounds featured in the invention. These include 5-substituted pyrimidines, 6-azapyrimidines and N-2, N-6 and 0-6 substituted purines, including 2-aminopropyladenine, 5-propynyluracil and 5-propynylcytosine. 5-methylcytosine substitutions have been shown to increase nucleic acid duplex stability by 0.6-1.2° C. (Sanghvi, Y. S., Crooke, S. T. and Lebleu, B., Eds., dsRNA Research and Applications, CRC Press, Boca Raton, 1993, pp. 276-278) and are exemplary base substitutions, even more particularly when combined with 2′-O-methoxyethyl sugar modifications.

[0318] Representative U.S. patents that teach the preparation of certain of the above noted modified nucleobases as well as other modified nucleobases include, but are not limited to, the above noted U.S. Pat. Nos. 3,687,808, 4,845,205; 5,130,30; 5,134,066; 5,175,273; 5,367,066; 5,432,272; 5,457,187; 5,459,255; 5,484,908; 5,502,177; 5,525,711; 5,552,540; 5,587,469; 5,594,121, 5,596,091; 5,614,617; 5,681,941; 5,750,692; 6,015,886; 6,147,200; 6,166,197; 6,222,025; 6,235,887; 6,380,368; 6,528,640; 6,639,062; 6,617,438; 7,045,610; 7,427,672; and 7,495,088, the entire contents of each of which are hereby incorporated herein by reference.

[0319] The RNA of an iRNA can also be modified to include one or more bicyclic sugar moities. A “bicyclic sugar” is a furanosyl ring modified by the bridging of two atoms. A“bicyclic nucleoside” (“BNA”) is a nucleoside having a sugar moiety comprising a bridge connecting two carbon atoms of the sugar ring, thereby forming a bicyclic ring system. In certain embodiments, the bridge connects the 4′-carbon and the 2′-carbon of the sugar ring. Thus, in some embodiments an agent of the invention may include one or more locked nucleic acids (LNA). A locked nucleic acid is a nucleotide having a modified ribose moiety in which the ribose moiety comprises an extra bridge connecting the 2′ and 4′ carbons. In other words, an LNA is a nucleotide comprising a bicyclic sugar moiety comprising a 4′-CH2-O-2′ bridge. This structure effectively “locks” the ribose in the 3′-endo structural conformation. The addition of locked nucleic acids to siRNAs has been shown to increase siRNA stability in serum, and to reduce off-target effects (Elmen, J. et al., (2005) Nucleic Acids Research 33(1):439-447; Mook, OR. Et al., (2007) Mol Canc Ther 6(3):833-843; Grunweller, A. et al., (2003) Nucleic Acids Research 31(12):3185-3193). Examples of bicyclic nucleosides for use in the polynucleotides of the invention include without limitation nucleosides comprising a bridge between the 4′ and the 2′ ribosyl ring atoms. In certain embodiments, the antisense polynucleotide agents of the invention include one or more bicyclic nucleosides comprising a 4′ to 2′ bridge. Examples of such 4′ to 2′ bridged bicyclic nucleosides, include but are not limited to 4′-(CH2)-O-2′ (LNA); 4′-(CH2)-S-2′; 4′-(CH₂)2-O-2′ (ENA); 4′-CH(CH3)-O-2′ (also referred to as “constrained ethyl” or “cEt”) and 4′-CH(CH2OCH3)-O-2′ (and analogs thereof; see, e.g., U.S. Pat. No. 7,399,845); 4′-C(CH3)(CH3)-0-2′ (and analogs thereof; see e.g., U.S. Pat. No. 8,278,283); 4′-CH2-N(OCH3)-2′ (and analogs thereof; see e.g., U.S. Pat. No. 8,278,425); 4′-CH2-O—N(CH3)-2′ (see, e.g., U.S. Patent Publication No. 2004/0171570); 4′-CH2-N(R)—O-2′, wherein R is H, C1-C12 alkyl, or a protecting group (see, e.g., U.S. Pat. No. 7,427,672); 4′-CH2-C(H)(CH3)-2′ (see, e.g., Chattopadhyaya et al., J. Org. Chem., 2009, 74, 118-134); and 4′-CH2-C(═CH2)-2′ (and analogs thereof; see, e.g., U.S. Pat. No. 8,278,426). The entire contents of each of the foregoing are hereby incorporated herein by reference.

[0320] Additional representative U.S. Patents and US Patent Publications that teach the preparation of locked nucleic acid nucleotides include, but are not limited to, the following: U.S. Pat. Nos. 6,268,490; 6,525,191; 6,670,461; 6,770,748; 6,794,499; 6,998,484; 7,053,207; 7,034,133; 7,084,125; 7,399,845; 7,427,672; 7,569,686; 7,741,457; 8,022,193; 8,030,467; 8,278,425; 8,278,426; 8,278,283; US 2008/0039618; and US 2009/0012281, the entire contents of each of which are hereby incorporated herein by reference.

[0321] Any of the foregoing bicyclic nucleosides can be prepared having one or more stereochemical sugar configurations including for example α-L-ribofuranose and β-D-ribofuranose (see WO 99/14226).

[0322] The RNA of an iRNA can also be modified to include one or more constrained ethyl nucleotides. As used herein, a “constrained ethyl nucleotide” or “cEt” is a locked nucleic acid comprising a bicyclic sugar moiety comprising a 4′-CH(CH₃)-O-2′ bridge. In one embodiment, a constrained ethyl nucleotide is in the S conformation referred to herein as “S-cEt.”

[0323] An iRNA of the invention may also include one or more “conformationally restricted nucleotides” (“CRN”). CRN are nucleotide analogs with a linker connecting the C2′ and C4′ carbons of ribose or the C3 and —C5′ carbons of ribose. CRN lock the ribose ring into a stable conformation and increase the hybridization affinity to mRNA. The linker is of sufficient length to place the oxygen in an optimal position for stability and affinity resulting in less ribose ring puckering.

[0324] Representative publications that teach the preparation of certain of the above noted CRN include, but are not limited to, US Patent Publication No. 2013/0190383; and PCT publication WO 2013/036868, the entire contents of each of which are hereby incorporated herein by reference.

[0325] One or more of the nucleotides of an iRNA of the invention may also include a hydroxymethyl substituted nucleotide. A “hydroxymethyl substituted nucleotide” is an acyclic 2′-3′-seco-nucleotide, also referred to as an “unlocked nucleic acid” (“UNA”) modification

[0326] Representative U.S. publications that teach the preparation of UNA include, but are not limited to, U.S. Pat. No. 8,314,227; and US Patent Publication Nos. 2013/0096289; 2013/0011922; and 2011/0313020, the entire contents of each of which are hereby incorporated herein by reference.

[0327] Potentially stabilizing modifications to the ends of RNA molecules can include N-(acetylaminocaproyl)-4-hydroxyprolinol (Hyp-C6-NHAc), N-(caproyl-4-hydroxyprolinol (Hyp-C6), N-(acetyl-4-hydroxyprolinol (Hyp-NHAc), thymidine-2′-0-deoxythymidine (ether), N-(aminocaproyl)-4-hydroxyprolinol (Hyp-C6-amino), 2-docosanoyl-uridine-3″-phosphate, inverted base dT(idT) and others. Disclosure of this modification can be found in PCT Publication No. WO 2011/005861.

[0328] Other modifications of the nucleotides of an iRNA of the invention include a 5′ phosphate or 5′ phosphate mimic, e.g., a 5′-terminal phosphate or phosphate mimic on the antisense strand of an RNAi agent. Suitable phosphate mimics are disclosed in, for example US Patent Publication No. 2012/0157511, the entire contents of which are incorporated herein by reference.

A. Modified iRNAs Comprising Motifs of the Invention

[0329] In certain aspects of the invention, the double stranded RNAi agents of the invention include agents with chemical modifications as disclosed, for example, in U.S. Provisional Application No. 61/561,710, filed on Nov. 18, 2011, or in PCT/US2012/065691, filed on Nov. 16, 2012, the entire contents of each of which are incorporated herein by reference.

[0330] As shown herein and in Provisional Application No. 61/561,710 or PCT Application No. PCT/US2012/065691, a superior result may be obtained by introducing one or more motifs of three identical modifications on three consecutive nucleotides into a sense strand and/or antisense strand of an RNAi agent, particularly at or near the cleavage site. In some embodiments, the sense strand and antisense strand of the RNAi agent may otherwise be completely modified. The introduction of these motifs interrupts the modification pattern, if present, of the sense and/or antisense strand. The RNAi agent may be optionally conjugated with a GalNAc derivative ligand, for instance on the sense strand.

[0331] The resulting RNAi agents present superior gene silencing activity. More specifically, it has been surprisingly discovered that when the sense strand and antisense strand of the double stranded RNAi agent are completely modified to have one or more motifs of three identical modifications on three consecutive nucleotides at or near the cleavage site of at least one strand of an RNAi agent, the gene silencing activity of the RNAi agent was superiorly enhanced.

[0332] Accordingly, the invention provides double stranded RNAi agents capable of inhibiting the expression of a target gene (i.e., a contact activation pathway gene, i.e. an F12 gene) in vivo. The RNAi agent comprises a sense strand and an antisense strand. Each strand of the RNAi agent may range from 12-30 nucleotides in length. For example, each strand may be between 14-30 nucleotides in length, 17-30 nucleotides in length, 25-30 nucleotides in length, 27-30 nucleotides in length, 17-23 nucleotides in length, 17-21 nucleotides in length, 17-19 nucleotides in length, 19-25 nucleotides in length, 19-23 nucleotides in length, 19-21 nucleotides in length, 21-25 nucleotides in length, or 21-23 nucleotides in length.

[0333] The sense strand and antisense strand typically form a duplex double stranded RNA (“dsRNA”), also referred to herein as an “RNAi agent.” The duplex region of an RNAi agent may be 12-30 nucleotide pairs in length. For example, the duplex region can be between 14-30 nucleotide pairs in length, 17-30 nucleotide pairs in length, 27-30 nucleotide pairs in length, 17-23 nucleotide pairs in length, 17-21 nucleotide pairs in length, 17-19 nucleotide pairs in length, 19-25 nucleotide pairs in length, 19-23 nucleotide pairs in length, 19-21 nucleotide pairs in length, 21-25 nucleotide pairs in length, or 21-23 nucleotide pairs in length. In another example, the duplex region is selected from 15, 16, 17, 18, 19, 20, 21, 22, 23, 24, 25, 26, and 27 nucleotides in length.

[0334] In one embodiment, the RNAi agent may contain one or more overhang regions and/or capping groups at the 3′-end, 5′-end, or both ends of one or both strands. The overhang can be 1-6 nucleotides in length, for instance 2-6 nucleotides in length, 1-5 nucleotides in length, 2-5 nucleotides in length, 1-4 nucleotides in length, 2-4 nucleotides in length, 1-3 nucleotides in length, 2-3 nucleotides in length, or 1-2 nucleotides in length. The overhangs can be the result of one strand being longer than the other, or the result of two strands of the same length being staggered. The overhang can form a mismatch with the target mRNA or it can be complementary to the gene sequences being targeted or can be another sequence. The first and second strands can also be joined, e.g., by additional bases to form a hairpin, or by other non-base linkers.

[0335] In one embodiment, the nucleotides in the overhang region of the RNAi agent can each independently be a modified or unmodified nucleotide including, but no limited to 2′-sugar modified, such as, 2-F, 2′-Omethyl, thymidine (T), 2′-O-methoxyethyl-5-methyluridine (Teo), 2′-O-methoxyethyladenosine (Aeo), 2′-O-methoxyethyl-5-methylcytidine (m5Ceo), and any combinations thereof. For example, TT can be an overhang sequence for either end on either strand. The overhang can form a mismatch with the target mRNA or it can be complementary to the gene sequences being targeted or can be another sequence.

[0336] The 5′- or 3′-overhangs at the sense strand, antisense strand or both strands of the RNAi agent may be phosphorylated. In some embodiments, the overhang region(s) contains two nucleotides having a phosphorothioate between the two nucleotides, where the two nucleotides can be the same or different. In one embodiment, the overhang is present at the 3′-end of the sense strand, antisense strand, or both strands. In one embodiment, this 3′-overhang is present in the antisense strand. In one embodiment, this 3′-overhang is present in the sense strand.

[0337] The RNAi agent may contain only a single overhang, which can strengthen the interference activity of the RNAi, without affecting its overall stability. For example, the single-stranded overhang may be located at the 3-terminal end of the sense strand or, alternatively, at the 3-terminal end of the antisense strand. The RNAi may also have a blunt end, located at the 5′-end of the antisense strand (or the 3′-end of the sense strand) or vice versa. Generally, the antisense strand of the RNAi has a nucleotide overhang at the 3′-end, and the 5′-end is blunt. While not wishing to be bound by theory, the asymmetric blunt end at the 5′-end of the antisense strand and 3′-end overhang of the antisense strand favor the guide strand loading into RISC process.

[0338] In one embodiment, the RNAi agent is a double ended bluntmer of 19 nucleotides in length, wherein the sense strand contains at least one motif of three 2′-F modifications on three consecutive nucleotides at positions 7, 8, 9 from the 5′end. The antisense strand contains at least one motif of three 2′-O-methyl modifications on three consecutive nucleotides at positions 11, 12, 13 from the 5′end.

[0339] In another embodiment, the RNAi agent is a double ended bluntmer of 20 nucleotides in length, wherein the sense strand contains at least one motif of three 2′-F modifications on three consecutive nucleotides at positions 8, 9, 10 from the 5′end. The antisense strand contains at least one motif of three 2′-O-methyl modifications on three consecutive nucleotides at positions 11, 12, 13 from the 5′end.

[0340] In yet another embodiment, the RNAi agent is a double ended bluntmer of 21 nucleotides in length, wherein the sense strand contains at least one motif of three 2′-F modifications on three consecutive nucleotides at positions 9, 10, 11 from the 5′end. The antisense strand contains at least one motif of three 2′-O-methyl modifications on three consecutive nucleotides at positions 11, 12, 13 from the 5′end.

[0341] In one embodiment, the RNAi agent comprises a 21 nucleotide sense strand and a 23 nucleotide antisense strand, wherein the sense strand contains at least one motif of three 2′-F modifications on three consecutive nucleotides at positions 9, 10, 11 from the 5′end; the antisense strand contains at least one motif of three 2′-O-methyl modifications on three consecutive nucleotides at positions 11, 12, 13 from the 5′end, wherein one end of the RNAi agent is blunt, while the other end comprises a 2 nucleotide overhang. Preferably, the 2 nucleotide overhang is at the 3′-end of the antisense strand.

[0342] When the 2 nucleotide overhang is at the 3′-end of the antisense strand, there may be two phosphorothioate internucleotide linkages between the terminal three nucleotides, wherein two of the three nucleotides are the overhang nucleotides, and the third nucleotide is a paired nucleotide next to the overhang nucleotide. In one embodiment, the RNAi agent additionally has two phosphorothioate internucleotide linkages between the terminal three nucleotides at both the 5′-end of the sense strand and at the 5′-end of the antisense strand. In one embodiment, every nucleotide in the sense strand and the antisense strand of the RNAi agent, including the nucleotides that are part of the motifs are modified nucleotides. In one embodiment each residue is independently modified with a 2′-O-methyl or 3′-fluoro, e.g., in an alternating motif. Optionally, the RNAi agent further comprises a ligand (preferably GalNAc₃).

[0343] In one embodiment, the RNAi agent comprises a sense and an antisense strand, wherein the sense strand is 25-30 nucleotide residues in length, wherein starting from the 5′ terminal nucleotide (position 1) positions 1 to 23 of the first strand comprise at least 8 ribonucleotides; the antisense strand is 36-66 nucleotide residues in length and, starting from the 3′ terminal nucleotide, comprises at least 8 ribonucleotides in the positions paired with positions 1-23 of sense strand to form a duplex; wherein at least the 3′terminal nucleotide of antisense strand is unpaired with sense strand, and up to 6 consecutive 3′ terminal nucleotides are unpaired with sense strand, thereby forming a 3′ single stranded overhang of 1-6 nucleotides; wherein the 5′ terminus of antisense strand comprises from 10-30 consecutive nucleotides which are unpaired with sense strand, thereby forming a 10-30 nucleotide single stranded 5′ overhang; wherein at least the sense strand 5′ terminal and 3′ terminal nucleotides are base paired with nucleotides of antisense strand when sense and antisense strands are aligned for maximum complementarity, thereby forming a substantially duplexed region between sense and antisense strands; and antisense strand is sufficiently complementary to a target RNA along at least 19 ribonucleotides of antisense strand length to reduce target gene expression when the double stranded nucleic acid is introduced into a mammalian cell; and wherein the sense strand contains at least one motif of three 2′-F modifications on three consecutive nucleotides, where at least one of the motifs occurs at or near the cleavage site. The antisense strand contains at least one motif of three 2′-O-methyl modifications on three consecutive nucleotides at or near the cleavage site.

[0344] In one embodiment, the RNAi agent comprises sense and antisense strands, wherein the RNAi agent comprises a first strand having a length which is at least 25 and at most 29 nucleotides and a second strand having a length which is at most 30 nucleotides with at least one motif of three 2′-O-methyl modifications on three consecutive nucleotides at position 11, 12, 13 from the 5′ end; wherein the 3′ end of the first strand and the 5′ end of the second strand form a blunt end and the second strand is 1-4 nucleotides longer at its 3′ end than the first strand, wherein the duplex region which is at least 25 nucleotides in length, and the second strand is sufficiently complementary to a target mRNA along at least 19 nucleotide of the second strand length to reduce target gene expression when the RNAi agent is introduced into a mammalian cell, and wherein dicer cleavage of the RNAi agent preferentially results in an siRNA comprising the 3′ end of the second strand, thereby reducing expression of the target gene in the mammal. Optionally, the RNAi agent further comprises a ligand.

[0345] In one embodiment, the sense strand of the RNAi agent contains at least one motif of three identical modifications on three consecutive nucleotides, where one of the motifs occurs at the cleavage site in the sense strand.

[0346] In one embodiment, the antisense strand of the RNAi agent can also contain at least one motif of three identical modifications on three consecutive nucleotides, where one of the motifs occurs at or near the cleavage site in the antisense strand

[0347] For an RNAi agent having a duplex region of 17-23 nucleotide in length, the cleavage site of the antisense strand is typically around the 10, 11 and 12 positions from the 5′-end. Thus the motifs of three identical modifications may occur at the 9, 10, 11 positions; 10, 11, 12 positions; 11, 12, 13 positions; 12, 13, 14 positions; or 13, 14, 15 positions of the antisense strand, the count starting from the 1^{st} nucleotide from the 5′-end of the antisense strand, or, the count starting from the 1^{st} paired nucleotide within the duplex region from the 5′-end of the antisense strand. The cleavage site in the antisense strand may also change according to the length of the duplex region of the RNAi from the 5′-end.

[0348] The sense strand of the RNAi agent may contain at least one motif of three identical modifications on three consecutive nucleotides at the cleavage site of the strand; and the antisense strand may have at least one motif of three identical modifications on three consecutive nucleotides at or near the cleavage site of the strand. When the sense strand and the antisense strand form a dsRNA duplex, the sense strand and the antisense strand can be so aligned that one motif of the three nucleotides on the sense strand and one motif of the three nucleotides on the antisense strand have at least one nucleotide overlap, i.e., at least one of the three nucleotides of the motif in the sense strand forms a base pair with at least one of the three nucleotides of the motif in the antisense strand. Alternatively, at least two nucleotides may overlap, or all three nucleotides may overlap.

[0349] In one embodiment, the sense strand of the RNAi agent may contain more than one motif of three identical modifications on three consecutive nucleotides. The first motif may occur at or near the cleavage site of the strand and the other motifs may be a wing modification. The term “wing modification” herein refers to a motif occurring at another portion of the strand that is separated from the motif at or near the cleavage site of the same strand. The wing modification is either adajacent to the first motif or is separated by at least one or more nucleotides. When the motifs are immediately adjacent to each other then the chemistry of the motifs are distinct from each other and when the motifs are separated by one or more nucleotide than the chemistries can be the same or different. Two or more wing modifications may be present. For instance, when two wing modifications are present, each wing modification may occur at one end relative to the first motif which is at or near cleavage site or on either side of the lead motif.

[0350] Like the sense strand, the antisense strand of the RNAi agent may contain more than one motifs of three identical modifications on three consecutive nucleotides, with at least one of the motifs occurring at or near the cleavage site of the strand. This antisense strand may also contain one or more wing modifications in an alignment similar to the wing modifications that may be present on the sense strand.

[0351] In one embodiment, the wing modification on the sense strand or antisense strand of the RNAi agent typically does not include the first one or two terminal nucleotides at the 3′-end, 5′-end or both ends of the strand.

[0352] In another embodiment, the wing modification on the sense strand or antisense strand of the RNAi agent typically does not include the first one or two paired nucleotides within the duplex region at the 3′-end, 5′-end or both ends of the strand.

[0353] When the sense strand and the antisense strand of the RNAi agent each contain at least one wing modification, the wing modifications may fall on the same end of the duplex region, and have an overlap of one, two or three nucleotides.

[0354] When the sense strand and the antisense strand of the RNAi agent each contain at least two wing modifications, the sense strand and the antisense strand can be so aligned that two modifications each from one strand fall on one end of the duplex region, having an overlap of one, two or three nucleotides; two modifications each from one strand fall on the other end of the duplex region, having an overlap of one, two or three nucleotides; two modifications one strand fall on each side of the lead motif, having an overlap of one, two or three nucleotides in the duplex region.

[0355] In one embodiment, every nucleotide in the sense strand and antisense strand of the RNAi agent, including the nucleotides that are part of the motifs, may be modified. Each nucleotide may be modified with the same or different modification which can include one or more alteration of one or both of the non-linking phosphate oxygens and/or of one or more of the linking phosphate oxygens; alteration of a constituent of the ribose sugar, e.g., of the 2′ hydroxyl on the ribose sugar; wholesale replacement of the phosphate moiety with “dephospho” linkers; modification or replacement of a naturally occurring base; and replacement or modification of the ribose-phosphate backbone.

[0356] As nucleic acids are polymers of subunits, many of the modifications occur at a position which is repeated within a nucleic acid, e.g., a modification of a base, or a phosphate moiety, or a non-linking O of a phosphate moiety. In some cases the modification will occur at all of the subject positions in the nucleic acid but in many cases it will not. By way of example, a modification may only occur at a 3′ or 5′ terminal position, may only occur in a terminal region, e.g., at a position on a terminal nucleotide or in the last 2, 3, 4, 5, or 10 nucleotides of a strand. A modification may occur in a double strand region, a single strand region, or in both. A modification may occur only in the double strand region of a RNA or may only occur in a single strand region of a RNA. For example, a phosphorothioate modification at a non-linking O position may only occur at one or both termini, may only occur in a terminal region, e.g., at a position on a terminal nucleotide or in the last 2, 3, 4, 5, or 10 nucleotides of a strand, or may occur in double strand and single strand regions, particularly at termini. The 5′ end or ends can be phosphorylated.

[0357] It may be possible, e.g., to enhance stability, to include particular bases in overhangs, or to include modified nucleotides or nucleotide surrogates, in single strand overhangs, e.g., in a 5′ or 3′ overhang, or in both. For example, it can be desirable to include purine nucleotides in overhangs. In some embodiments all or some of the bases in a 3′ or 5′ overhang may be modified, e.g., with a modification described herein. Modifications can include, e.g., the use of modifications at the 2′ position of the ribose sugar with modifications that are known in the art, e.g., the use of deoxyribonucleotides, 2′-deoxy-2′-fluoro (2′-F) or 2′-O-methyl modified instead of the ribosugar of the nucleobase, and modifications in the phosphate group, e.g., phosphorothioate modifications. Overhangs need not be homologous with the target sequence.

[0358] In one embodiment, each residue of the sense strand and antisense strand is independently modified with LNA, CRN, cET, UNA, HNA, CeNA, 2′-methoxyethyl, 2′-O-methyl, 2′-O-allyl, 2′-C-allyl, 2′-deoxy, 2′-hydroxyl, or 2′-fluoro. The strands can contain more than one modification. In one embodiment, each residue of the sense strand and antisense strand is independently modified with 2′-O-methyl or 2′-fluoro.

[0359] At least two different modifications are typically present on the sense strand and antisense strand. Those two modifications may be the 2′-O-methyl or 2′-fluoro modifications, or others.

[0360] In one embodiment, the Nₐ and/or N_{b} comprise modifications of an alternating pattern. The term “alternating motif” as used herein refers to a motif having one or more modifications, each modification occurring on alternating nucleotides of one strand. The alternating nucleotide may refer to one per every other nucleotide or one per every three nucleotides, or a similar pattern. For example, if A, B and C each represent one type of modification to the nucleotide, the alternating motif can be “ABABABABABAB . . . ,” “AABBAABBAABB . . . ,” “AABAABAABAAB . . . ,” “AAABAAABAAAB . . . ,” “AAABBBAAABBB . . . ,” or “ABCABCABCABC . . . ,” etc.

[0361] The type of modifications contained in the alternating motif may be the same or different. For example, if A, B, C, D each represent one type of modification on the nucleotide, the alternating pattern, i.e., modifications on every other nucleotide, may be the same, but each of the sense strand or antisense strand can be selected from several possibilities of modifications within the alternating motif such as “ABABAB . . . ”, “ACACAC . . . ” “BDBDBD . . . ” or “CDCDCD . . . ,” etc.

[0362] In one embodiment, the RNAi agent of the invention comprises the modification pattern for the alternating motif on the sense strand relative to the modification pattern for the alternating motif on the antisense strand is shifted. The shift may be such that the modified group of nucleotides of the sense strand corresponds to a differently modified group of nucleotides of the antisense strand and vice versa. For example, the sense strand when paired with the antisense strand in the dsRNA duplex, the alternating motif in the sense strand may start with “ABABAB” from 5′-3′ of the strand and the alternating motif in the antisense strand may start with “BABABA” from 5′-3′ of the strand within the duplex region. As another example, the alternating motif in the sense strand may start with “AABBAABB” from 5′-3′ of the strand and the alternating motif in the antisenese strand may start with “BBAABBAA” from 5′-3′ of the strand within the duplex region, so that there is a complete or partial shift of the modification patterns between the sense strand and the antisense strand.

[0363] In one embodiment, the RNAi agent comprises the pattern of the alternating motif of 2′-O-methyl modification and 2′-F modification on the sense strand initially has a shift relative to the pattern of the alternating motif of 2′-O-methyl modification and 2′-F modification on the antisense strand initially, i.e., the 2′-O-methyl modified nucleotide on the sense strand base pairs with a 2′-F modified nucleotide on the antisense strand and vice versa. The 1 position of the sense strand may start with the 2′-F modification, and the 1 position of the antisense strand may start with the 2′-O-methyl modification.

[0364] The introduction of one or more motifs of three identical modifications on three consecutive nucleotides to the sense strand and/or antisense strand interrupts the initial modification pattern present in the sense strand and/or antisense strand. This interruption of the modification pattern of the sense and/or antisense strand by introducing one or more motifs of three identical modifications on three consecutive nucleotides to the sense and/or antisense strand surprisingly enhances the gene silencing activity to the target gene.

[0365] In one embodiment, when the motif of three identical modifications on three consecutive nucleotides is introduced to any of the strands, the modification of the nucleotide next to the motif is a different modification than the modification of the motif. For example, the portion of the sequence containing the motif is “ . . . NₐYYYN_{b} . . . ,” where “Y” represents the modification of the motif of three identical modifications on three consecutive nucleotide, and “Nₐ” and “N_{b}” represent a modification to the nucleotide next to the motif “YYY” that is different than the modification of Y, and where Nₐ and N_{b} can be the same or different modifications. Alternatively, Nₐ and/or N_{b} may be present or absent when there is a wing modification present.

[0366] The RNAi agent may further comprise at least one phosphorothioate or methylphosphonate internucleotide linkage. The phosphorothioate or methylphosphonate internucleotide linkage modification may occur on any nucleotide of the sense strand or antisense strand or both strands in any position of the strand. For instance, the internucleotide linkage modification may occur on every nucleotide on the sense strand and/or antisense strand; each internucleotide linkage modification may occur in an alternating pattern on the sense strand and/or antisense strand; or the sense strand or antisense strand may contain both internucleotide linkage modifications in an alternating pattern. The alternating pattern of the internucleotide linkage modification on the sense strand may be the same or different from the antisense strand, and the alternating pattern of the internucleotide linkage modification on the sense strand may have a shift relative to the alternating pattern of the internucleotide linkage modification on the antisense strand. In one embodiment, a double-stranded RNAi agent comprises 6-8phosphorothioate internucleotide linkages. In one embodiment, the antisense strand comprises two phosphorothioate internucleotide linkages at the 5′-terminus and two phosphorothioate internucleotide linkages at the 3′-terminus, and the sense strand comprises at least two phosphorothioate internucleotide linkages at either the 5′-terminus or the 3′-terminus.

[0367] In one embodiment, the RNAi comprises a phosphorothioate or methylphosphonate internucleotide linkage modification in the overhang region. For example, the overhang region may contain two nucleotides having a phosphorothioate or methylphosphonate internucleotide linkage between the two nucleotides. Internucleotide linkage modifications also may be made to link the overhang nucleotides with the terminal paired nucleotides within the duplex region. For example, at least 2, 3, 4, or all the overhang nucleotides may be linked through phosphorothioate or methylphosphonate internucleotide linkage, and optionally, there may be additional phosphorothioate or methylphosphonate internucleotide linkages linking the overhang nucleotide with a paired nucleotide that is next to the overhang nucleotide. For instance, there may be at least two phosphorothioate internucleotide linkages between the terminal three nucleotides, in which two of the three nucleotides are overhang nucleotides, and the third is a paired nucleotide next to the overhang nucleotide. These terminal three nucleotides may be at the 3′-end of the antisense strand, the 3′-end of the sense strand, the 5′-end of the antisense strand, and/or the 5′end of the antisense strand.

[0368] In one embodiment, the 2 nucleotide overhang is at the 3′-end of the antisense strand, and there are two phosphorothioate internucleotide linkages between the terminal three nucleotides, wherein two of the three nucleotides are the overhang nucleotides, and the third nucleotide is a paired nucleotide next to the overhang nucleotide. Optionally, the RNAi agent may additionally have two phosphorothioate internucleotide linkages between the terminal three nucleotides at both the 5′-end of the sense strand and at the 5′-end of the antisense strand.

[0369] In one embodiment, the RNAi agent comprises mismatch(es) with the target, within the duplex, or combinations thereof. The mistmatch may occur in the overhang region or the duplex region. The base pair may be ranked on the basis of their propensity to promote dissociation or melting (e.g., on the free energy of association or dissociation of a particular pairing, the simplest approach is to examine the pairs on an individual pair basis, though next neighbor or similar analysis can also be used). In terms of promoting dissociation: A:U is preferred over G:C; G:U is preferred over G:C; and I:C is preferred over G:C (I=inosine). Mismatches, e.g., non-canonical or other than canonical pairings (as described elsewhere herein) are preferred over canonical (A:T, A:U, G:C) pairings; and pairings which include a universal base are preferred over canonical pairings.

[0370] In one embodiment, the RNAi agent comprises at least one of the first 1, 2, 3, 4, or 5 base pairs within the duplex regions from the 5′-end of the antisense strand independently selected from the group of: A:U, G:U, I:C, and mismatched pairs, e.g., non-canonical or other than canonical pairings or pairings which include a universal base, to promote the dissociation of the antisense strand at the 5′-end of the duplex.

[0371] In one embodiment, the nucleotide at the 1 position within the duplex region from the 5′-end in the antisense strand is selected from the group consisting of A, dA, dU, U, and dT. Alternatively, at least one of the first 1, 2 or 3 base pair within the duplex region from the 5′-end of the antisense strand is an AU base pair. For example, the first base pair within the duplex region from the 5′-end of the antisense strand is an AU base pair.

[0372] In another embodiment, the nucleotide at the 3′-end of the sense strand is deoxy-thymine (dT). In another embodiment, the nucleotide at the 3′-end of the antisense strand is deoxy-thymine (dT). In one embodiment, there is a short sequence of deoxy-thymine nucleotides, for example, two dT nucleotides on the 3′-end of the sense and/or antisense strand.

[0373] In one embodiment, the sense strand sequence may be represented by formula (I):

(I)
5′ nₚ-Nₐ-(X X X)ᵢ-N_{b}-Y Y Y-N_{b}-(Z Z Z)ⱼ-Nₐ-n_{q} 3′

[0374] wherein:
[0375] i and j are each independently 0 or 1;
[0376] p and q are each independently 0-6;
[0377] each Nₐ independently represents an oligonucleotide sequence comprising 0-25 modified nucleotides, each sequence comprising at least two differently modified nucleotides;
[0378] each N_{b} independently represents an oligonucleotide sequence comprising 0-10 modified nucleotides;
[0379] each nₚ and n_{q} independently represent an overhang nucleotide;
[0380] wherein Nb and Y do not have the same modification; and
[0381] XXX, YYY and ZZZ each independently represent one motif of three identical modifications on three consecutive nucleotides. Preferably YYY is all 2′-F modified nucleotides.

[0382] In one embodiment, the Nₐ and/or N_{b} comprise modifications of alternating pattern.

[0383] In one embodiment, the YYY motif occurs at or near the cleavage site of the sense strand. For example, when the RNAi agent has a duplex region of 17-23 nucleotides in length, the YYY motif can occur at or the vicinity of the cleavage site (e.g.: can occur at positions 6, 7, 8, 7, 8, 9, 8, 9, 10, 9, 10, 11, 10, 11,12 or 11, 12, 13) of—the sense strand, the count starting from the 1^{st} nucleotide, from the 5′-end; or optionally, the count starting at the 1^{st} paired nucleotide within the duplex region, from the 5′-end.

[0384] In one embodiment, i is 1 and j is 0, or i is 0 and j is 1, or both i and j are 1. The sense strand can therefore be represented by the following formulas:

(Ib)
5′ nₚ-Nₐ-YYY-N_{b}-ZZZ-Nₐ-n_{q} 3′;
(Ic)
5′ nₚ-Nₐ-XXX-N_{b}-YYY-Nₐ-n_{q} 3′;
or
(Id)
5′ nₚ-Nₐ-XXX-N_{b}-YYY-N_{b}-ZZZ-Nₐ-n_{q} 3′.

[0385] When the sense strand is represented by formula (Ib), N_{b} represents an oligonucleotide sequence comprising 0-10, 0-7, 0-5, 0-4, 0-2 or 0 modified nucleotides. Each Nₐ independently can represent an oligonucleotide sequence comprising 2-20, 2-15, or 2-10 modified nucleotides.

[0386] When the sense strand is represented as formula (Ic), N_{b} represents an oligonucleotide sequence comprising 0-10, 0-7, 0-10, 0-7, 0-5, 0-4, 0-2 or 0 modified nucleotides. Each Nₐ can independently represent an oligonucleotide sequence comprising 2-20, 2-15, or 2-10 modified nucleotides.

[0387] When the sense strand is represented as formula (Id), each N_{b} independently represents an oligonucleotide sequence comprising 0-10, 0-7, 0-5, 0-4, 0-2 or 0 modified nucleotides. Preferably, N_{b} is 0, 1, 2, 3, 4, 5 or 6 Each Nₐ can independently represent an oligonucleotide sequence comprising 2-20, 2-15, or 2-10 modified nucleotides.

Each of X, Y and Z may be the same or different from each other.

[0388] In other embodiments, i is 0 and j is 0, and the sense strand may be represented by the formula:

(Ia)
5′ nₚ-Nₐ-YYY-Nₐ-n_{q} 3′.

[0389] When the sense strand is represented by formula (Ia), each Nₐ independently can represent an oligonucleotide sequence comprising 2-20, 2-15, or 2-10 modified nucleotides.

[0390] In one embodiment, the antisense strand sequence of the RNAi may be represented by formula (II):

(II)
5′ n_{q}′-Nₐ′-(Z′Z′Z′)K-N_{b}′-Y′Y′Y′-
N_{b}′-(X′X′X′)ₗ-N′ₐ-nₚ′ 3′

[0391] wherein:
[0392] k and 1 are each independently 0 or 1;
[0393] p′ and q′ are each independently 0-6;
[0394] each Nₐ′ independently represents an oligonucleotide sequence comprising 0-25 modified nucleotides, each sequence comprising at least two differently modified nucleotides;
[0395] each N_{b}′ independently represents an oligonucleotide sequence comprising 0-10 modified nucleotides;
[0396] each nₚ′ and n_{q}′ independently represent an overhang nucleotide;
[0397] wherein N_{b}′ and Y′ do not have the same modification; and
[0398] X′X′X′, Y′Y′Y′ and Z′Z′Z′ each independently represent one motif of three identical modifications on three consecutive nucleotides.

[0399] In one embodiment, the Nₐ′ and/or N_{b}′ comprise modifications of alternating pattern.

[0400] The Y′Y′Y′ motif occurs at or near the cleavage site of the antisense strand. For example, when the RNAi agent has a duplex region of 17-23nucleotidein length, the Y′Y′Y′ motif can occur at positions 9, 10, 11; 10, 11, 12; 11, 12, 13; 12, 13, 14; or 13, 14, 15 of the antisense strand, with the count starting from the 1^{st} nucleotide, from the 5′-end; or optionally, the count starting at the 1⁴′ paired nucleotide within the duplex region, from the 5′-end. Preferably, the Y′Y′Y′ motif occurs at positions 11, 12, 13.

[0401] In one embodiment, Y′Y′Y′ motif is all 2′-OMe modified nucleotides.

[0402] In one embodiment, k is 1 and 1 is 0, or k is 0 and 1 is 1, or both k and 1 are 1.

[0403] The antisense strand can therefore be represented by the following formulas:

(IIb)
5′ n_{q}′-Nₐ′-Z′Z′Z′-N_{b}′-Y′Y′Y′-Nₐ′-nₚ′ 3′;
(IIc)
5′ n_{q}′-Nₐ′-Y′Y′Y′-N_{b}′-X′X′X′-nₚ′ 3′;
or
(IId)
5′ n_{q}′-Nₐ′-Z′Z′Z′-N_{b}′-Y′Y′Y′-N_{b}′-X′X′X′-Nₐ′-nₚ 3′.

[0404] When the antisense strand is represented by formula (IIb), N_{b}′ represents an oligonucleotide sequence comprising 0-10, 0-7, 0-10, 0-7, 0-5, 0-4, 0-2 or 0 modified nucleotides. Each Nₐ′ independently represents an oligonucleotide sequence comprising 2-20, 2-15, or 2-10 modified nucleotides.

[0405] When the antisense strand is represented as formula (IIc), N_{b}′ represents an oligonucleotide sequence comprising 0-10, 0-7, 0-10, 0-7, 0-5, 0-4, 0-2 or 0 modified nucleotides. Each Nₐ′ independently represents an oligonucleotide sequence comprising 2-20, 2-15, or 2-10 modified nucleotides.

[0406] When the antisense strand is represented as formula (IId), each N_{b}′ independently represents an oligonucleotide sequence comprising 0-10, 0-7, 0-10, 0-7, 0-5, 0-4, 0-2 or 0 modified nucleotides. Each Nₐ′ independently represents an oligonucleotide sequence comprising 2-20, 2-15, or 2-10 modified nucleotides. Preferably, N_{b} is 0, 1, 2, 3, 4, 5 or 6.

[0407] In other embodiments, k is 0 and 1 is 0 and the antisense strand may be represented by the formula:

(Ia)
5′ nₚ′-Nₐ′-Y′Y′Y′-Nₐ′-n_{q}′ 3′.

[0408] When the antisense strand is represented as formula (IIa), each Nₐ′ independently represents an oligonucleotide sequence comprising 2-20, 2-15, or 2-10 modified nucleotides.

Each of X′, Y′ and Z′ may be the same or different from each other.
Each nucleotide of the sense strand and antisense strand may be independently modified with LNA, CRN, UNA, cEt, HNA, CeNA, 2′-methoxyethyl, 2′-O-methyl, 2′-O-allyl, 2′-C-allyl, 2′-hydroxyl, or 2′-fluoro. For example, each nucleotide of the sense strand and antisense strand is independently modified with 2′-O-methyl or 2′-fluoro. Each X, Y, Z, X′, Y′ and Z′, in particular, may represent a 2′-O-methyl modification or a 2′-fluoro modification.

[0409] In one embodiment, the sense strand of the RNAi agent may contain YYY motif occurring at 9, 10 and 11 positions of the strand when the duplex region is 21 nt, the count starting from the 1^{st}nucleotide from the 5′-end, or optionally, the count starting at the 1^{st} paired nucleotide within the duplex region, from the 5′-end; and Y represents 2′-F modification. The sense strand may additionally contain XXX motif or ZZZ motifs as wing modifications at the opposite end of the duplex region; and XXX and ZZZ each independently represents a 2′-OMe modification or 2′-F modification.

[0410] In one embodiment the antisense strand may contain Y′Y′Y′ motif occurring at positions 11, 12, 13 of the strand, the count starting from the 1^{st} nucleotide from the 5′-end, or optionally, the count starting at the 1⁴′ paired nucleotide within the duplex region, from the 5′-end; and Y′ represents 2′-O-methyl modification. The antisense strand may additionally contain X′X′X′ motif or Z′Z′Z′ motifs as wing modifications at the opposite end of the duplex region; and X′X′X′ and Z′Z′Z′ each independently represents a 2′-OMe modification or 2′-F modification.

The sense strand represented by any one of the above formulas (Ia), (Ib), (Ic), and (Id) forms a duplex with a antisense strand being represented by any one of formulas (IIa), (IIb), (IIc), and (IId), respectively.

[0411] Accordingly, the RNAi agents for use in the methods of the invention may comprise a sense strand and an antisense strand, each strand having 14 to 30 nucleotides, the RNAi duplex represented by formula (III):

(III)
sense:
5′ nₚ-Nₐ-(X X X)ᵢ-N_{b}-Y Y Y-N_{b}-(Z Z Z)ⱼ-Nₐ-n_{q} 3′
antisense:
3′ nₚ′-Nₐ′-(X′X′X′)K-N_{b}′-Y′Y′Y′-
N_{b}′-(Z′Z′Z′)I-Nₐ′-n_{q}′ 5′

[0412] wherein:
[0413] i, j, k, and 1 are each independently 0 or 1;
[0414] p, p′, q, and q′ are each independently 0-6;
[0415] each Nₐ and Nₐ′ independently represents an oligonucleotide sequence comprising 0-25 modified nucleotides, each sequence comprising at least two differently modified nucleotides;
[0416] each N_{b} and N_{b}′ independently represents an oligonucleotide sequence comprising 0-10 modified nucleotides;
[0417] wherein each nₚ′, nₚ, n_{q}′, and n_{q}, each of which may or may not be present, independently represents an overhang nucleotide; and
[0418] XXX, YYY, ZZZ, X′X′X′, Y′Y′Y′, and Z′Z′Z′ each independently represent one motif of three identical modifications on three consecutive nucleotides.

[0419] In one embodiment, i is 0 and j is 0; or i is 1 and j is 0; or i is 0 and j is 1; or both i and j are 0; or both i and j are 1. In another embodiment, k is 0 and 1 is 0; or k is 1 and 1 is 0; k is 0 and 1 is 1; or both k and 1 are 0; or both k and 1 are 1.

[0420] Exemplary combinations of the sense strand and antisense strand forming a RNAi duplex include the formulas below:

(IIIa)
5′ nₚ-Nₐ-Y Y Y-Nₐ-n_{q} 3′
3′ nₚ′-Nₐ′-Y′Y′Y′-Nₐ′n_{q}′ 5′
(IIIb)
5′ nₚ-Nₐ-Y Y Y-N_{b}-Z Z Z-Nₐ-n_{q} 3′
3′ nₚ′-Nₐ-Y′Y′Y′-Nₒ′-Z′Z′Z′-Nₐ′n_{q}′ 5′
(IIIc)
5′ nₚ-Nₐ-X X X-N_{b}-Y Y Y-Nₐ-n_{q} 3′
3′ nₚ′-Nₐ′-X′X′X′-ND′-Y′Y′Y′-Nₐ′-n_{q}′ 5′
(IIId)
5′ nₚ-Nₐ-X X X-N_{b}-Y Y Y-N_{b}-Z Z Z-Nₐ-n_{q} 3′
3′ nₚ′-Nₐ′-X′X′X′-ND′-Y′Y′Y′-Nₒ′-Z′Z′Z′-Nₐ-n_{q} 5′

[0421] When the RNAi agent is represented by formula (IIIa), each Nₐ independently represents an oligonucleotide sequence comprising 2-20, 2-15, or 2-10 modified nucleotides.

[0422] When the RNAi agent is represented by formula (IIIb), each N_{b} independently represents an oligonucleotide sequence comprising 1-10, 1-7, 1-5 or 1-4 modified nucleotides. Each Nₐ independently represents an oligonucleotide sequence comprising 2-20, 2-15, or 2-10 modified nucleotides.

[0423] When the RNAi agent is represented as formula (IIIc), each N_{b}, N_{b}′ independently represents an oligonucleotide sequence comprising 0-10, 0-7, 0-10, 0-7, 0-5, 0-4, 0-2 or 0 modified nucleotides. Each Nₐ independently represents an oligonucleotide sequence comprising 2-20, 2-15, or 2-10 modified nucleotides.

[0424] When the RNAi agent is represented as formula (IIId), each N_{b}, N_{b}′ independently represents an oligonucleotide sequence comprising 0-10, 0-7, 0-10, 0-7, 0-5, 0-4, 0-2 or Omodified nucleotides. Each Nₐ, Nₐ′ independently represents an oligonucleotide sequence comprising 2-20, 2-15, or 2-10 modified nucleotides. Each of Nₐ, Nₐ′, N_{b} and N_{b}′ independently comprises modifications of alternating pattern.

[0425] Each of X, Y and Z in formulas (III), (IIIa), (IIIb), (IIIc), and (IIId) may be the same or different from each other.

[0426] When the RNAi agent is represented by formula (III), (IIIa), (IIIb), (IIIc), and (IIId), at least one of the Y nucleotides may form a base pair with one of the Y′ nucleotides. Alternatively, at least two of the Y nucleotides form base pairs with the corresponding Y′ nucleotides; or all three of the Y nucleotides all form base pairs with the corresponding Y′ nucleotides.

[0427] When the RNAi agent is represented by formula (IIIb) or (IIId), at least one of the Z nucleotides may form a base pair with one of the Z′ nucleotides. Alternatively, at least two of the Z nucleotides form base pairs with the corresponding Z′ nucleotides; or all three of the Z nucleotides all form base pairs with the corresponding Z′ nucleotides.

[0428] When the RNAi agent is represented as formula (IIIc) or (IIId), at least one of the X nucleotides may form a base pair with one of the X′ nucleotides. Alternatively, at least two of the X nucleotides form base pairs with the corresponding X′ nucleotides; or all three of the X nucleotides all form base pairs with the corresponding X′ nucleotides.

[0429] In one embodiment, the modification on the Y nucleotide is different than the modification on the Y′ nucleotide, the modification on the Z nucleotide is different than the modification on the Z′ nucleotide, and/or the modification on the X nucleotide is different than the modification on the X′ nucleotide.

[0430] In one embodiment, when the RNAi agent is represented by formula (IIId), the Nₐ modifications are 2′-O-methyl or 2′-fluoro modifications. In another embodiment, when the RNAi agent is represented by formula (IIId), the Nₐ modifications are 2′-O-methyl or 2′-fluoro modifications and nₚ′>0 and at least one nₚ′ is linked to a neighboring nucleotide a via phosphorothioate linkage. In yet another embodiment, when the RNAi agent is represented by formula (IIId), the Nₐ modifications are 2′-O-methyl or 2′-fluoro modifications, nₚ′>0 and at least one nₚ′ is linked to a neighboring nucleotide via phosphorothioate linkage, and the sense strand is conjugated to one or more GalNAc derivatives attached through a bivalent or trivalent branched linker (described below). In another embodiment, when the RNAi agent is represented by formula (IIId), the Nₐ modifications are 2′-O-methyl or 2′-fluoro modifications, nₚ′>0 and at least one nₚ′ is linked to a neighboring nucleotide via phosphorothioate linkage, the sense strand comprises at least one phosphorothioate linkage, and the sense strand is conjugated to one or more GalNAc derivatives attached through a bivalent or trivalent branched linker.

[0431] In one embodiment, when the RNAi agent is represented by formula (IIIa), the Nₐ modifications are 2′-O-methyl or 2′-fluoro modifications, nₚ′>0 and at least one nₚ′ is linked to a neighboring nucleotide via phosphorothioate linkage, the sense strand comprises at least one phosphorothioate linkage, and the sense strand is conjugated to one or more GalNAc derivatives attached through a bivalent or trivalent branched linker.

[0432] In one embodiment, the RNAi agent is a multimer containing at least two duplexes represented by formula (III), (IIIa), (IIIb), (IIIc), and (IIId), wherein the duplexes are connected by a linker. The linker can be cleavable or non-cleavable. Optionally, the multimer further comprises a ligand. Each of the duplexes can target the same gene or two different genes; or each of the duplexes can target same gene at two different target sites.

[0433] In one embodiment, the RNAi agent is a multimer containing three, four, five, six or more duplexes represented by formula (III), (IIIa), (IIIb), (IIIc), and (IIId), wherein the duplexes are connected by a linker. The linker can be cleavable or non-cleavable. Optionally, the multimer further comprises a ligand. Each of the duplexes can target the same gene or two different genes; or each of the duplexes can target same gene at two different target sites.

[0434] In one embodiment, two RNAi agents represented by formula (III), (IIIa), (IIIb), (IIIc), and (IIId) are linked to each other at the 5′ end, and one or both of the 3′ ends and are optionally conjugated to to a ligand. Each of the agents can target the same gene or two different genes; or each of the agents can target same gene at two different target sites.

[0435] Various publications describe multimeric RNAi agents that can be used in the methods of the invention. Such publications include WO2007/091269, U.S. Pat. No. 7,858,769, WO2010/141511, WO2007/117686, WO2009/014887 and WO2011/031520 the entire contents of each of which are hereby incorporated herein by reference.

[0436] As described in more detail below, the RNAi agent that contains conjugations of one or more carbohydrate moieties to a RNAi agent can optimize one or more properties of the RNAi agent. In many cases, the carbohydrate moiety will be attached to a modified subunit of the RNAi agent. For example, the ribose sugar of one or more ribonucleotide subunits of a dsRNA agent can be replaced with another moiety, e.g., a non-carbohydrate (preferably cyclic) carrier to which is attached a carbohydrate ligand. A ribonucleotide subunit in which the ribose sugar of the subunit has been so replaced is referred to herein as a ribose replacement modification subunit (RRMS). A cyclic carrier may be a carbocyclic ring system, i.e., all ring atoms are carbon atoms, or a heterocyclic ring system, i.e., one or more ring atoms may be a heteroatom, e.g., nitrogen, oxygen, sulfur. The cyclic carrier may be a monocyclic ring system, or may contain two or more rings, e.g. fused rings. The cyclic carrier may be a fully saturated ring system, or it may contain one or more double bonds.

[0437] The ligand may be attached to the polynucleotide via a carrier. The carriers include (i) at least one “backbone attachment point,” preferably two “backbone attachment points” and (ii) at least one “tethering attachment point.” A “backbone attachment point” as used herein refers to a functional group, e.g. a hydroxyl group, or generally, a bond available for, and that is suitable for incorporation of the carrier into the backbone, e.g., the phosphate, or modified phosphate, e.g., sulfur containing, backbone, of a ribonucleic acid. A “tethering attachment point” (TAP) in some embodiments refers to a constituent ring atom of the cyclic carrier, e.g., a carbon atom or a heteroatom (distinct from an atom which provides a backbone attachment point), that connects a selected moiety. The moiety can be, e.g., a carbohydrate, e.g. monosaccharide, disaccharide, trisaccharide, tetrasaccharide, oligosaccharide and polysaccharide. Optionally, the selected moiety is connected by an intervening tether to the cyclic carrier. Thus, the cyclic carrier will often include a functional group, e.g., an amino group, or generally, provide a bond, that is suitable for incorporation or tethering of another chemical entity, e.g., a ligand to the constituent ring.

[0438] The RNAi agents may be conjugated to a ligand via a carrier, wherein the carrier can be cyclic group or acyclic group; preferably, the cyclic group is selected from pyrrolidinyl, pyrazolinyl, pyrazolidinyl, imidazolinyl, imidazolidinyl, piperidinyl, piperazinyl, [1,3]dioxolane, oxazolidinyl, isoxazolidinyl, morpholinyl, thiazolidinyl, isothiazolidinyl, quinoxalinyl, pyridazinonyl, tetrahydrofuryl and decalin; preferably, the acyclic group is selected from serinol backbone or diethanolamine backbone.

[0439] In certain specific embodiments, the RNAi agent for use in the methods of the invention is an agent selected from the group of agents listed in any one of Tables 3, 4, 9-12, 14, 15, 17, and 18. In one embodiment, the agent is any one of the agents listed in any one of Tables 3, 4, 9-12, 14, 15, 17, and 18. These agents may further comprise a ligand.

### VI. iRNAs Conjugated to Ligands

[0440] Another modification of the RNA of an iRNA of the invention involves chemically linking to the RNA one or more ligands, moieties or conjugates that enhance the activity, cellular distribution or cellular uptake of the iRNA. Such moieties include but are not limited to lipid moieties such as a cholesterol moiety (Letsinger et al., Proc. Natl. Acid. Sci. USA, 1989, 86: 6553-6556), cholic acid (Manoharan et al., Biorg. Med. Chem. Let., 1994, 4:1053-1060), a thioether, e.g., beryl-S-tritylthiol (Manoharan et al., Ann. N. Y. Acad. Sci., 1992, 660:306-309; Manoharan et al., Biorg. Med. Chem. Let., 1993, 3:2765-2770), a thiocholesterol (Oberhauser et al., Nucl. Acids Res., 1992, 20:533-538), an aliphatic chain, e.g., dodecandiol or undecyl residues (Saison-Behmoaras et al., EMBO J, 1991, 10:1111-1118; Kabanov et al., FEBS Lett., 1990, 259:327-330; Svinarchuk et al., Biochimie, 1993, 75:49-54), a phospholipid, e.g., di-hexadecyl-rac-glycerol or triethyl-ammonium 1,2-di-0-hexadecyl-rac-glycero-3-phosphonate (Manoharan et al., Tetrahedron Lett., 1995, 36:3651-3654; Shea et al., Nucl. Acids Res., 1990, 18:3777-3783), a polyamine or a polyethylene glycol chain (Manoharan et al., Nucleosides & Nucleotides, 1995, 14:969-973), or adamantane acetic acid (Manoharan et al., Tetrahedron Lett., 1995, 36:3651-3654), a palmityl moiety (Mishra et al., Biochim. Biophys. Acta, 1995, 1264:229-237), or an octadecylamine or hexylamino-carbonyloxycholesterol moiety (Crooke et al., J. Pharmacol. Exp. Ther., 1996, 277:923-937).

[0441] In one embodiment, a ligand alters the distribution, targeting or lifetime of an iRNA agent into which it is incorporated. In preferred embodiments a ligand provides an enhanced affinity for a selected target, e.g., molecule, cell or cell type, compartment, e.g., a cellular or organ compartment, tissue, organ or region of the body, as, e.g., compared to a species absent such a ligand. Preferred ligands will not take part in duplex pairing in a duplexed nucleic acid.

[0442] Ligands can include a naturally occurring substance, such as a protein (e.g., human serum albumin (HSA), low-density lipoprotein (LDL), or globulin); carbohydrate (e.g., a dextran, pullulan, chitin, chitosan, inulin, cyclodextrin, N-acetylgalactosamine, or hyaluronic acid); or a lipid. The ligand can also be a recombinant or synthetic molecule, such as a synthetic polymer, e.g., a synthetic polyamino acid. Examples of polyamino acids include polyamino acid is a polylysine (PLL), poly L-aspartic acid, poly L-glutamic acid, styrene-maleic acid anhydride copolymer, poly(L-lactide-co-glycolied) copolymer, divinyl ether-maleic anhydride copolymer, N-(2-hydroxypropyl)methacrylamide copolymer (HMPA), polyethylene glycol (PEG), polyvinyl alcohol (PVA), polyurethane, poly(2-ethylacryllic acid), N-isopropylacrylamide polymers, or polyphosphazine. Example of polyamines include: polyethylenimine, polylysine (PLL), spermine, spermidine, polyamine, pseudopeptide-polyamine, peptidomimetic polyamine, dendrimer polyamine, arginine, amidine, protamine, cationic lipid, cationic porphyrin, quaternary salt of a polyamine, or an alpha helical peptide.

[0443] Ligands can also include targeting groups, e.g., a cell or tissue targeting agent, e.g., a lectin, glycoprotein, lipid or protein, e.g., an antibody, that binds to a specified cell type such as a kidney cell. A targeting group can be a thyrotropin, melanotropin, lectin, glycoprotein, surfactant protein A, Mucin carbohydrate, multivalent lactose, multivalent galactose, N-acetyl-galactosamine, N-acetyl-gulucoseamine multivalent mannose, multivalent fucose, glycosylated polyaminoacids, multivalent galactose, transferrin, bisphosphonate, polyglutamate, polyaspartate, a lipid, cholesterol, a steroid, bile acid, folate, vitamin B12, vitamin A, biotin, or an RGD peptide or RGD peptide mimetic.

[0444] Other examples of ligands include dyes, intercalating agents (e.g. acridines), cross-linkers (e.g. psoralene, mitomycin C), porphyrins (TPPC4, texaphyrin, Sapphyrin), polycyclic aromatic hydrocarbons (e.g., phenazine, dihydrophenazine), artificial endonucleases (e.g. EDTA), lipophilic molecules, e.g., cholesterol, cholic acid, adamantane acetic acid, 1-pyrene butyric acid, dihydrotestosterone, 1,3-Bis-O(hexadecyl)glycerol, geranyloxyhexyl group, hexadecylglycerol, borneol, menthol, 1,3-propanediol, heptadecyl group, palmitic acid, myristic acid,O3-(oleoyl)lithocholic acid, O3-(oleoyl)cholenic acid, dimethoxytrityl, or phenoxazine) and peptide conjugates (e.g., antennapedia peptide, Tat peptide), alkylating agents, phosphate, amino, mercapto, PEG (e.g., PEG-40K), MPEG, [MPEG]₂, polyamino, alkyl, substituted alkyl, radiolabeled markers, enzymes, haptens (e.g. biotin), transport/absorption facilitators (e.g., aspirin, vitamin E, folic acid), synthetic ribonucleases (e.g., imidazole, bisimidazole, histamine, imidazole clusters, acridine-imidazole conjugates, Eu3+ complexes of tetraazamacrocycles), dinitrophenyl, HRP, or AP.

[0445] Ligands can be proteins, e.g., glycoproteins, or peptides, e.g., molecules having a specific affinity for a co-ligand, or antibodies e.g., an antibody, that binds to a specified cell type such as a hepatic cell. Ligands can also include hormones and hormone receptors. They can also include non-peptidic species, such as lipids, lectins, carbohydrates, vitamins, cofactors, multivalent lactose, multivalent galactose, N-acetyl-galactosamine, N-acetyl-gulucosamine multivalent mannose, or multivalent fucose. The ligand can be, for example, a lipopolysaccharide, an activator of p38 MAP kinase, or an activator of NF-κB.

[0446] The ligand can be a substance, e.g., a drug, which can increase the uptake of the iRNA agent into the cell, for example, by disrupting the cell's cytoskeleton, e.g., by disrupting the cell's microtubules, microfilaments, and/or intermediate filaments. The drug can be, for example, taxon, vincristine, vinblastine, cytochalasin, nocodazole, japlakinolide, latrunculin A, phalloidin, swinholide A, indanocine, or myoservin.

[0447] In some embodiments, a ligand attached to an iRNA as described herein acts as a pharmacokinetic modulator (PK modulator). PK modulators include lipophiles, bile acids, steroids, phospholipid analogues, peptides, protein binding agents, PEG, vitamins etc. Exemplary PK modulators include, but are not limited to, cholesterol, fatty acids, cholic acid, lithocholic acid, dialkylglycerides, diacylglyceride, phospholipids, sphingolipids, naproxen, ibuprofen, vitamin E, biotin etc. Oligonucleotides that comprise a number of phosphorothioate linkages are also known to bind to serum protein, thus short oligonucleotides, e.g., oligonucleotides of about 5 bases, 10 bases, 15 bases or 20 bases, comprising multiple of phosphorothioate linkages in the backbone are also amenable to the present invention as ligands (e.g. as PK modulating ligands). In addition, aptamers that bind serum components (e.g. serum proteins) are also suitable for use as PK modulating ligands in the embodiments described herein.

[0448] Ligand-conjugated oligonucleotides of the invention may be synthesized by the use of an oligonucleotide that bears a pendant reactive functionality, such as that derived from the attachment of a linking molecule onto the oligonucleotide (described below). This reactive oligonucleotide may be reacted directly with commercially-available ligands, ligands that are synthesized bearing any of a variety of protecting groups, or ligands that have a linking moiety attached thereto.

[0449] The oligonucleotides used in the conjugates of the present invention may be conveniently and routinely made through the well-known technique of solid-phase synthesis. Equipment for such synthesis is sold by several vendors including, for example, Applied Biosystems (Foster City, Calif.). Any other means for such synthesis known in the art may additionally or alternatively be employed. It is also known to use similar techniques to prepare other oligonucleotides, such as the phosphorothioates and alkylated derivatives.

[0450] In the ligand-conjugated oligonucleotides and ligand-molecule bearing sequence-specific linked nucleosides of the present invention, the oligonucleotides and oligonucleosides may be assembled on a suitable DNA synthesizer utilizing standard nucleotide or nucleoside precursors, or nucleotide or nucleoside conjugate precursors that already bear the linking moiety, ligand-nucleotide or nucleoside-conjugate precursors that already bear the ligand molecule, or non-nucleoside ligand-bearing building blocks.

[0451] When using nucleotide-conjugate precursors that already bear a linking moiety, the synthesis of the sequence-specific linked nucleosides is typically completed, and the ligand molecule is then reacted with the linking moiety to form the ligand-conjugated oligonucleotide. In some embodiments, the oligonucleotides or linked nucleosides of the present invention are synthesized by an automated synthesizer using phosphoramidites derived from ligand-nucleoside conjugates in addition to the standard phosphoramidites and non-standard phosphoramidites that are commercially available and routinely used in oligonucleotide synthesis.

### A. Lipid Conjugates

[0452] In one embodiment, the ligand or conjugate is a lipid or lipid-based molecule. Such a lipid or lipid-based molecule preferably binds a serum protein, e.g., human serum albumin (HSA). An HSA binding ligand allows for distribution of the conjugate to a target tissue, e.g., a non-kidney target tissue of the body. For example, the target tissue can be the liver, including parenchymal cells of the liver. Other molecules that can bind HSA can also be used as ligands. For example, naproxen or aspirin can be used. A lipid or lipid-based ligand can (a) increase resistance to degradation of the conjugate, (b) increase targeting or transport into a target cell or cell membrane, and/or (c) can be used to adjust binding to a serum protein, e.g., HSA.

[0453] A lipid based ligand can be used to inhibit, e.g., control the binding of the conjugate to a target tissue. For example, a lipid or lipid-based ligand that binds to HSA more strongly will be less likely to be targeted to the kidney and therefore less likely to be cleared from the body. A lipid or lipid-based ligand that binds to HSA less strongly can be used to target the conjugate to the kidney.

[0454] In a preferred embodiment, the lipid based ligand binds HSA. Preferably, it binds HSA with a sufficient affinity such that the conjugate will be preferably distributed to a non-kidney tissue. However, it is preferred that the affinity not be so strong that the HSA-ligand binding cannot be reversed.

[0455] In another preferred embodiment, the lipid based ligand binds HSA weakly or not at all, such that the conjugate will be preferably distributed to the kidney. Other moieties that target to kidney cells can also be used in place of or in addition to the lipid based ligand.

[0456] In another aspect, the ligand is a moiety, e.g., a vitamin, which is taken up by a target cell, e.g., a proliferating cell. These are particularly useful for treating disorders characterized by unwanted cell proliferation, e.g., of the malignant or non-malignant type, e.g., cancer cells. Exemplary vitamins include vitamin A, E, and K. Other exemplary vitamins include are B vitamin, e.g., folic acid, B12, riboflavin, biotin, pyridoxal or other vitamins or nutrients taken up by target cells such as liver cells. Also included are HSA and low density lipoprotein (LDL).

### B. Cell Permeation Agents

[0457] In another aspect, the ligand is a cell-permeation agent, preferably a helical cell-permeation agent. Preferably, the agent is amphipathic. An exemplary agent is a peptide such as tat or antennopedia. If the agent is a peptide, it can be modified, including a peptidylmimetic, invertomers, non-peptide or pseudo-peptide linkages, and use of D-amino acids. The helical agent is preferably an alpha-helical agent, which preferably has a lipophilic and a lipophobic phase.

[0458] The ligand can be a peptide or peptidomimetic. A peptidomimetic (also referred to herein as an oligopeptidomimetic) is a molecule capable of folding into a defined three-dimensional structure similar to a natural peptide. The attachment of peptide and peptidomimetics to iRNA agents can affect pharmacokinetic distribution of the iRNA, such as by enhancing cellular recognition and absorption. The peptide or peptidomimetic moiety can be about 5-50 amino acids long, e.g., about 5, 10, 15, 20, 25, 30, 35, 40, 45, or 50 amino acids long.

[0459] A peptide or peptidomimetic can be, for example, a cell permeation peptide, cationic peptide, amphipathic peptide, or hydrophobic peptide (e.g., consisting primarily of Tyr, Trp or Phe). The peptide moiety can be a dendrimer peptide, constrained peptide or crosslinked peptide. In another alternative, the peptide moiety can include a hydrophobic membrane translocation sequence (MTS). An exemplary hydrophobic MTS-containing peptide is RFGF having the amino acid sequence AAVALLPAVLLALLAP (SEQ ID NO: 26). An RFGF analogue (e.g., amino acid sequence AALLPVLLAAP (SEQ ID NO: 27) containing a hydrophobic MTS can also be a targeting moiety. The peptide moiety can be a “delivery” peptide, which can carry large polar molecules including peptides, oligonucleotides, and protein across cell membranes. For example, sequences from the HIV Tat protein (GRKKRRQRRRPPQ (SEQ ID NO: 28) and the Drosophila Antennapedia protein (RQIKIWFQNRRMKWKK (SEQ ID NO: 29) have been found to be capable of functioning as delivery peptides. A peptide or peptidomimetic can be encoded by a random sequence of DNA, such as a peptide identified from a phage-display library, or one-bead-one-compound (OBOC) combinatorial library (Lam et al., Nature, 354:82-84, 1991). Examples of a peptide or peptidomimetic tethered to a dsRNA agent via an incorporated monomer unit for cell targeting purposes is an arginine-glycine-aspartic acid (RGD)-peptide, or RGD mimic. A peptide moiety can range in length from about 5 amino acids to about 40 amino acids. The peptide moieties can have a structural modification, such as to increase stability or direct conformational properties. Any of the structural modifications described below can be utilized.

[0460] An RGD peptide for use in the compositions and methods of the invention may be linear or cyclic, and may be modified, e.g., glycosylated or methylated, to facilitate targeting to a specific tissue(s). RGD-containing peptides and peptidiomimemtics may include D-amino acids, as well as synthetic RGD mimics. In addition to RGD, one can use other moieties that target the integrin ligand. Preferred conjugates of this ligand target PECAM-1 or VEGF.

[0461] A “cell permeation peptide” is capable of permeating a cell, e.g., a microbial cell, such as a bacterial or fungal cell, or a mammalian cell, such as a human cell. A microbial cell-permeating peptide can be, for example, an α-helical linear peptide (e.g., LL-37 or Ceropin P1), a disulfide bond-containing peptide (e.g., α-defensin, β-defensin or bactenecin), or a peptide containing only one or two dominating amino acids (e.g., PR-39 or indolicidin). A cell permeation peptide can also include a nuclear localization signal (NLS). For example, a cell permeation peptide can be a bipartite amphipathic peptide, such as MPG, which is derived from the fusion peptide domain of HIV-1 gp41 and the NLS of SV40 large T antigen (Simeoni et al., Nucl. Acids Res. 31:2717-2724, 2003).

### C. Carbohydrate Conjugates

[0462] In some embodiments of the compositions and methods of the invention, an iRNA oligonucleotide further comprises a carbohydrate. The carbohydrate conjugated iRNA are advantageous for the in vivo delivery of nucleic acids, as well as compositions suitable for in vivo therapeutic use, as described herein. As used herein, “carbohydrate” refers to a compound which is either a carbohydrate per se made up of one or more monosaccharide units having at least 6 carbon atoms (which can be linear, branched or cyclic) with an oxygen, nitrogen or sulfur atom bonded to each carbon atom; or a compound having as a part thereof a carbohydrate moiety made up of one or more monosaccharide units each having at least six carbon atoms (which can be linear, branched or cyclic), with an oxygen, nitrogen or sulfur atom bonded to each carbon atom. Representative carbohydrates include the sugars (mono-, di-, tri- and oligosaccharides containing from about 4, 5, 6, 7, 8, or 9 monosaccharide units), and polysaccharides such as starches, glycogen, cellulose and polysaccharide gums. Specific monosaccharides include HBV and above (e.g., HBV, C6, C7, or C8) sugars; di- and trisaccharides include sugars having two or three monosaccharide units (e.g., HBV, C6, C7, or C8).

[0463] In one embodiment, a carbohydrate conjugate for use in the compositions and methods of the invention is a monosaccharide. In another embodiment, a carbohydrate conjugate for use in the compositions and methods of the invention is selected from the group consisting of:

[chemical structure]

[chemical structure]

[chemical structure]

[chemical structure]

[0464] In one embodiment, the monosaccharide is an N-acetylgalactosamine, such as

[chemical structure]

[0465] Another representative carbohydrate conjugate for use in the embodiments described herein includes, but is not limited to,

[chemical structure]

[0466] (Formula XXIII), when one of X or Y is an oligonucleotide, the other is a hydrogen.

[0467] In certain embodiments of the invention, the GalNAc or GalNAc derivative is attached to an iRNA agent of the invention via a monovalent linker. In some embodiments, the GalNAc or GalNAc derivative is attached to an iRNA agent of the invention via a bivalent linker. In yet other embodiments of the invention, the GalNAc or GalNAc derivative is attached to an iRNA agent of the invention via a trivalent linker.

[0468] In one embodiment, the double stranded RNAi agents of the invention comprise one GalNAc or GalNAc derivative attached to the iRNA agent. In another embodiment, the double stranded RNAi agents of the invention comprise a plurality (e.g., 2, 3, 4, 5, or 6) GalNAc or GalNAc derivatives, each independently attached to a plurality of nucleotides of the double stranded RNAi agent through a plurality of monovalent linkers.

[0469] In some embodiments, for example, when the two strands of an iRNA agent of the invention are part of one larger molecule connected by an uninterrupted chain of nucleotides between the 3′-end of one strand and the 5′-end of the respective other strand forming a hairpin loop comprising, a plurality of unpaired nucleotides, each unpaired nucleotide within the hairpin loop may independently comprise a GalNAc or GalNAc derivative attached via a monovalent linker.

[0470] In some embodiments, the carbohydrate conjugate further comprises one or more additional ligands as described above, such as, but not limited to, a PK modulator and/or a cell permeation peptide.

[0471] Additional carbohydrate conjugates suitable for use in the present invention include those described in PCT Publication Nos. WO 2014/179620 and WO 2014/179627, the entire contents of each of which are incorporated herein by reference.

### D. Linkers

[0472] In some embodiments, the conjugate or ligand described herein can be attached to an iRNA oligonucleotide with various linkers that can be cleavable or non-cleavable.

[0473] The term “linker” or “linking group” means an organic moiety that connects two parts of a compound, e.g., covalently attaches two parts of a compound. Linkers typically comprise a direct bond or an atom such as oxygen or sulfur, a unit such as NR8, C(O), C(O)NH, SO, SO₂, SO₂NH or a chain of atoms, such as, but not limited to, substituted or unsubstituted alkyl, substituted or unsubstituted alkenyl, substituted or unsubstituted alkynyl, arylalkyl, arylalkenyl, arylalkynyl, heteroarylalkyl, heteroarylalkenyl, heteroarylalkynyl, heterocyclylalkyl, heterocyclylalkenyl, heterocyclylalkynyl, aryl, heteroaryl, heterocyclyl, cycloalkyl, cycloalkenyl, alkylarylalkyl, alkylarylalkenyl, alkylarylalkynyl, alkenylarylalkyl, alkenylarylalkenyl, alkenylarylalkynyl, alkynylarylalkyl, alkynylarylalkenyl, alkynylarylalkynyl, alkylheteroarylalkyl, alkylheteroarylalkenyl, alkylheteroarylalkynyl, alkenylheteroarylalkyl, alkenylheteroarylalkenyl, alkenylheteroarylalkynyl, alkynylheteroarylalkyl, alkynylheteroarylalkenyl, alkynylheteroarylalkynyl, alkylheterocyclylalkyl, alkylheterocyclylalkenyl, alkylhererocyclylalkynyl, alkenylheterocyclylalkyl, alkenylheterocyclylalkenyl, alkenylheterocyclylalkynyl, alkynylheterocyclylalkyl, alkynylheterocyclylalkenyl, alkynylheterocyclylalkynyl, alkylaryl, alkenylaryl, alkynylaryl, alkylheteroaryl, alkenylheteroaryl, alkynylhereroaryl, which one or more methylenes can be interrupted or terminated by O, S, S(O), SO₂, N(R8), C(O), substituted or unsubstituted aryl, substituted or unsubstituted heteroaryl, substituted or unsubstituted heterocyclic; where R8 is hydrogen, acyl, aliphatic or substituted aliphatic. In one embodiment, the linker is between about 1-24 atoms, 2-24, 3-24, 4-24, 5-24, 6-24, 6-18, 7-18, 8-18 atoms, 7-17, 8-17, 6-16, 7-16, or 8-16 atoms.

[0474] A cleavable linking group is one which is sufficiently stable outside the cell, but which upon entry into a target cell is cleaved to release the two parts the linker is holding together. In a preferred embodiment, the cleavable linking group is cleaved at least about 10 times, 20, times, 30 times, 40 times, 50 times, 60 times, 70 times, 80 times, 90 times or more, or at least about 100 times faster in a target cell or under a first reference condition (which can, e.g., be selected to mimic or represent intracellular conditions) than in the blood of a subject, or under a second reference condition (which can, e.g., be selected to mimic or represent conditions found in the blood or serum).

[0475] Cleavable linking groups are susceptible to cleavage agents, e.g., pH, redox potential or the presence of degradative molecules. Generally, cleavage agents are more prevalent or found at higher levels or activities inside cells than in serum or blood. Examples of such degradative agents include: redox agents which are selected for particular substrates or which have no substrate specificity, including, e.g., oxidative or reductive enzymes or reductive agents such as mercaptans, present in cells, that can degrade a redox cleavable linking group by reduction; esterases; endosomes or agents that can create an acidic environment, e.g., those that result in a pH of five or lower; enzymes that can hydrolyze or degrade an acid cleavable linking group by acting as a general acid, peptidases (which can be substrate specific), and phosphatases.

[0476] A cleavable linkage group, such as a disulfide bond can be susceptible to pH. The pH of human serum is 7.4, while the average intracellular pH is slightly lower, ranging from about 7.1-7.3. Endosomes have a more acidic pH, in the range of 5.5-6.0, and lysosomes have an even more acidic pH at around 5.0. Some linkers will have a cleavable linking group that is cleaved at a preferred pH, thereby releasing a cationic lipid from the ligand inside the cell, or into the desired compartment of the cell.

[0477] A linker can include a cleavable linking group that is cleavable by a particular enzyme. The type of cleavable linking group incorporated into a linker can depend on the cell to be targeted. For example, a liver-targeting ligand can be linked to a cationic lipid through a linker that includes an ester group. Liver cells are rich in esterases, and therefore the linker will be cleaved more efficiently in liver cells than in cell types that are not esterase-rich. Other cell-types rich in esterases include cells of the lung, renal cortex, and testis.

[0478] Linkers that contain peptide bonds can be used when targeting cell types rich in peptidases, such as liver cells and synoviocytes.

[0479] In general, the suitability of a candidate cleavable linking group can be evaluated by testing the ability of a degradative agent (or condition) to cleave the candidate linking group. It will also be desirable to also test the candidate cleavable linking group for the ability to resist cleavage in the blood or when in contact with other non-target tissue. Thus, one can determine the relative susceptibility to cleavage between a first and a second condition, where the first is selected to be indicative of cleavage in a target cell and the second is selected to be indicative of cleavage in other tissues or biological fluids, e.g., blood or serum. The evaluations can be carried out in cell free systems, in cells, in cell culture, in organ or tissue culture, or in whole animals. It can be useful to make initial evaluations in cell-free or culture conditions and to confirm by further evaluations in whole animals. In preferred embodiments, useful candidate compounds are cleaved at least about 2, 4, 10, 20, 30, 40, 50, 60, 70, 80, 90, or about 100 times faster in the cell (or under in vitro conditions selected to mimic intracellular conditions) as compared to blood or serum (or under in vitro conditions selected to mimic extracellular conditions).

i. Redox Cleavable Linking Groups

[0480] In one embodiment, a cleavable linking group is a redox cleavable linking group that is cleaved upon reduction or oxidation. An example of reductively cleavable linking group is a disulphide linking group (—S—S—). To determine if a candidate cleavable linking group is a suitable “reductively cleavable linking group,” or for example is suitable for use with a particular iRNA moiety and particular targeting agent one can look to methods described herein. For example, a candidate can be evaluated by incubation with dithiothreitol (DTT), or other reducing agent using reagents know in the art, which mimic the rate of cleavage which would be observed in a cell, e.g., a target cell. The candidates can also be evaluated under conditions which are selected to mimic blood or serum conditions. In one, candidate compounds are cleaved by at most about 10% in the blood. In other embodiments, useful candidate compounds are degraded at least about 2, 4, 10, 20, 30, 40, 50, 60, 70, 80, 90, or about 100 times faster in the cell (or under in vitro conditions selected to mimic intracellular conditions) as compared to blood (or under in vitro conditions selected to mimic extracellular conditions). The rate of cleavage of candidate compounds can be determined using standard enzyme kinetics assays under conditions chosen to mimic intracellular media and compared to conditions chosen to mimic extracellular media.

ii. Phosphate-based cleavable linking groups

[0481] In another embodiment, a cleavable linker comprises a phosphate-based cleavable linking group. A phosphate-based cleavable linking group is cleaved by agents that degrade or hydrolyze the phosphate group. An example of an agent that cleaves phosphate groups in cells are enzymes such as phosphatases in cells. Examples of phosphate-based linking groups are —O—P(O)(ORk)-O—, —O—P(S)(ORk)-O—, —O—P(S)(SRk)-O—, —S—P(O)(ORk)-O—, —O—P(O)(ORk)-S—, —S—P(O)(ORk)-S—, —O—P(S)(ORk)-S—, —S—P(S)(ORk)-O—, —O—P(O)(Rk)-O—, —O—P(S)(Rk)-O—, —S—P(O)(Rk)-O—, —S—P(S)(Rk)-O—, —S—P(O)(Rk)-S—, —O—P(S)(Rk)-S-Preferred embodiments are —O—P(O)(OH)—O—, —O—P(S)(OH)—O—, —O—P(S)(SH)—O—, —S—P(O)(OH)—O—, —O—P(O)(OH)—S—, —S—P(O)(OH)—S—, —O—P(S)(OH)—S—, —S—P(S)(OH)—O—, —O—P(O)(H)—O—, —O—P(S)(H)—O—, —S—P(O)(H)—O, —S—P(S)(H)—O—, —S—P(O)(H)—S—, —O—P(S)(H)—S—. A preferred embodiment is —O—P(O)(OH)—O—. These candidates can be evaluated using methods analogous to those described above.

iii. Acid Cleavable Linking Groups

[0482] In another embodiment, a cleavable linker comprises an acid cleavable linking group. An acid cleavable linking group is a linking group that is cleaved under acidic conditions. In preferred embodiments acid cleavable linking groups are cleaved in an acidic environment with a pH of about 6.5 or lower (e.g., about 6.0, 5.75, 5.5, 5.25, 5.0, or lower), or by agents such as enzymes that can act as a general acid. In a cell, specific low pH organelles, such as endosomes and lysosomes can provide a cleaving environment for acid cleavable linking groups. Examples of acid cleavable linking groups include but are not limited to hydrazones, esters, and esters of amino acids. Acid cleavable groups can have the general formula —C═NN—, C(O)O, or —OC(O). A preferred embodiment is when the carbon attached to the oxygen of the ester (the alkoxy group) is an aryl group, substituted alkyl group, or tertiary alkyl group such as dimethyl pentyl or t-butyl. These candidates can be evaluated using methods analogous to those described above.

iv. Ester-Based Linking Groups

[0483] In another embodiment, a cleavable linker comprises an ester-based cleavable linking group. An ester-based cleavable linking group is cleaved by enzymes such as esterases and amidases in cells. Examples of ester-based cleavable linking groups include but are not limited to esters of alkylene, alkenylene and alkynylene groups. Ester cleavable linking groups have the general formula —C(O)O—, or —OC(O)—. These candidates can be evaluated using methods analogous to those described above.

v. Peptide-Based Cleaving Groups

[0484] In yet another embodiment, a cleavable linker comprises a peptide-based cleavable linking group. A peptide-based cleavable linking group is cleaved by enzymes such as peptidases and proteases in cells. Peptide-based cleavable linking groups are peptide bonds formed between amino acids to yield oligopeptides (e.g., dipeptides, tripeptides etc.) and polypeptides. Peptide-based cleavable groups do not include the amide group (—C(O)NH—). The amide group can be formed between any alkylene, alkenylene or alkynelene. A peptide bond is a special type of amide bond formed between amino acids to yield peptides and proteins. The peptide based cleavage group is generally limited to the peptide bond (i.e., the amide bond) formed between amino acids yielding peptides and proteins and does not include the entire amide functional group. Peptide-based cleavable linking groups have the general formula —NHCHRAC(O)NHCHRBC(O)—, where RA and RB are the R groups of the two adjacent amino acids. These candidates can be evaluated using methods analogous to those described above.

[0485] In one embodiment, an iRNA of the invention is conjugated to a carbohydrate through a linker. Non-limiting examples of iRNA carbohydrate conjugates with linkers of the compositions and methods of the invention include, but are not limited to,

[chemical structure]

[chemical structure]

[chemical structure]

[0486] when one of X or Y is an oligonucleotide, the other is a hydrogen.

[0487] In certain embodiments of the compositions and methods of the invention, a ligand is one or more “GalNAc” (N-acetylgalactosamine) derivatives attached through a bivalent or trivalent branched linker.

[0488] In one embodiment, a dsRNA of the invention is conjugated to a bivalent or trivalent branched linker selected from the group of structures shown in any of formula (XXXII)-(XXXV):

[chemical structure]

wherein:
[0489] q2A, q2B, q3A, q3B, q4A, q4B, q5A, q5B and q5C represent independently for each occurrence 0-20 and wherein the repeating unit can be the same or different;
[0490] p^{2A} p^{2B} p^{3A}, p^{3B}, p^{4A}, p^{4B}, p^{5A}, p^{5B}, p^{5C}, T^{2A}, T^{2B}, T^{3A}, T^{3B}, T^{4A}, T^{4B}, T^{4A} T^{5B}, T^{5C} are each independently for each occurrence absent, CO, NH, O, S, OC(O), NHC(O), CH₂, CH₂NH or CH₂O;
[0491] Q^{2A}, Q^{2B}, Q^{3A}, Q^{3B}, Q^{4A}, Q^{4B}, Q^{5A}, Q^{5B}, Q^{5C} are independently for each occurrence absent, alkylene, substituted alkylene wherin one or more methylenes can be interrupted or terminated by one or more of O, S, S(O), SO₂, N(R^{N}), C(R′)═C(R″), C—C or C(O);
[0492] R^{2A}, R^{2B}, R^{3A}, R^{3B}, R^{4A}, R^{4B}, R^{5A}, R^{5B}, R^{5C} are each independently for each occurrence absent, NH, O, S, CH₂, C(O)O, C(O)NH, NHCH(R^{a})C(O), —C(O)—CH(R^{a})—NH—, CO, CH═N—O,

[chemical structure]

or heterocyclyl;

[0493] L^{2A}, L^{2B}, L^{3A}, L^{3B}, L^{4A}, L^{4B} L⁵A, L^{5B} and L^{5C} represent the ligand; i.e. each independently for each occurrence a monosaccharide (such as GalNAc), disaccharide, trisaccharide, tetrasaccharide, oligosaccharide, or polysaccharide; andRa is H or amino acid side chain.Trivalent conjugating GalNAc derivatives are particularly useful for use with RNAi agents for inhibiting the expression of a target gene, such as those of formula (XXXV):

[chemical structure]

[0494] wherein L^{5A}, L^{5B} and L^{5C} represent a monosaccharide, such as GalNAc derivative.

[0495] Examples of suitable bivalent and trivalent branched linker groups conjugating GalNAc derivatives include, but are not limited to, the structures recited above as formulas II, VII, XI, X, and XIII.

[0496] Representative U.S. patents that teach the preparation of RNA conjugates include, but are not limited to, U.S. Pat. Nos. 4,828,979; 4,948,882; 5,218,105; 5,525,465; 5,541,313; 5,545,730; 5,552,538; 5,578,717, 5,580,731; 5,591,584; 5,109,124; 5,118,802; 5,138,045; 5,414,077; 5,486,603; 5,512,439; 5,578,718; 5,608,046; 4,587,044; 4,605,735; 4,667,025; 4,762,779; 4,789,737; 4,824,941; 4,835,263; 4,876,335; 4,904,582; 4,958,013; 5,082,830; 5,112,963; 5,214,136; 5,082,830; 5,112,963; 5,214,136; 5,245,022; 5,254,469; 5,258,506; 5,262,536; 5,272,250; 5,292,873; 5,317,098; 5,371,241, 5,391,723; 5,416,203, 5,451,463; 5,510,475; 5,512,667; 5,514,785; 5,565,552; 5,567,810; 5,574,142; 5,585,481; 5,587,371; 5,595,726; 5,597,696; 5,599,923; 5,599,928 and 5,688,941; 6,294,664; 6,320,017; 6,576,752; 6,783,931; 6,900,297; 7,037,646; 8,106,022, the entire contents of each of which are hereby incorporated herein by reference.

[0497] It is not necessary for all positions in a given compound to be uniformly modified, and in fact more than one of the aforementioned modifications can be incorporated in a single compound or even at a single nucleoside within an iRNA. The present invention also includes iRNA compounds that are chimeric compounds.

[0498] “Chimeric” iRNA compounds or “chimeras,” in the context of this invention, are iRNA compounds, preferably dsRNAs, which contain two or more chemically distinct regions, each made up of at least one monomer unit, i.e., a nucleotide in the case of a dsRNA compound. These iRNAs typically contain at least one region wherein the RNA is modified so as to confer upon the iRNA increased resistance to nuclease degradation, increased cellular uptake, and/or increased binding affinity for the target nucleic acid. An additional region of the iRNA can serve as a substrate for enzymes capable of cleaving RNa:DNA or RNA:RNA hybrids. By way of example, RNase H is a cellular endonuclease which cleaves the RNa strand of an RNA:DNA duplex. Activation of RNase H, therefore, results in cleavage of the RNA target, thereby greatly enhancing the efficiency of iRNA inhibition of gene expression. Consequently, comparable results can often be obtained with shorter iRNAs when chimeric dsRNAs are used, compared to phosphorothioate deoxy dsRNAs hybridizing to the same target region. Cleavage of the RNA target can be routinely detected by gel electrophoresis and, if necessary, associated nucleic acid hybridization techniques known in the art.

[0499] In certain instances, the RNA of an iRNA can be modified by a non-ligand group. A number of non-ligand molecules have been conjugated to iRNAs in order to enhance the activity, cellular distribution or cellular uptake of the iRNA, and procedures for performing such conjugations are available in the scientific literature. Such non-ligand moieties have included lipid moieties, such as cholesterol (Kubo, T. et al., Biochem. Biophys. Res. Comm., 2007, 365(1):54-61; Letsinger et al., Proc. P Natl. Acad. Sci. USA, 1989, 86:6553), cholic acid (Manoharan et al., Bioorg. Med. Chem. Lett., 1994, 4:1053), a thioether, e.g., hexyl-S-tritylthiol (Manoharan et al., Ann. N.Y. Acad. Sci., 1992, 660:306; Manoharan et al., Bioorg. Med. Chem. Let., 1993, 3:2765), a thiocholesterol (Oberhauser et al., Nucl. Acids Res., 1992, 20:533), an aliphatic chain, e.g., dodecandiol or undecyl residues (Saison-Behmoaras et al., EMBO J., 1991, 10:111; Kabanov et al., FEBS Lett., 1990, 259:327; Svinarchuk et al., Biochimie, 1993, 75:49), a phospholipid, e.g., di-hexadecyl-rac-glycerol or triethylammonium 1,2-di-0-hexadecyl-rac-glycero-3-H-phosphonate (Manoharan et al., Tetrahedron Lett., 1995, 36:3651; Shea et al., Nucl. Acids Res., 1990, 18:3777), a polyamine or a polyethylene glycol chain (Manoharan et al., Nucleosides & Nucleotides, 1995, 14:969), or adamantane acetic acid (Manoharan et al., Tetrahedron Lett., 1995, 36:3651), a palmityl moiety (Mishra et al., Biochim. Biophys. Acta, 1995, 1264:229), or an octadecylamine or hexylamino-carbonyl-oxycholesterol moiety (Crooke et al., J. Pharmacol. Exp. Ther., 1996, 277:923). Representative United States patents that teach the preparation of such RNA conjugates have been listed above. Typical conjugation protocols involve the synthesis of an RNAs bearing an aminolinker at one or more positions of the sequence. The amino group is then reacted with the molecule being conjugated using appropriate coupling or activating reagents. The conjugation reaction can be performed either with the RNA still bound to the solid support or following cleavage of the RNA, in solution phase. Purification of the RNA conjugate by HPLC typically affords the pure conjugate.

### VII. Delivery of an iRNA of the Invention

[0500] The delivery of an iRNA of the invention to a cell e.g., a cell within a subject, such as a human subject (e.g., a subject in need thereof, such as a subject having a disease, disorder or condition associated with contact activation pathway gene expression) can be achieved in a number of different ways. For example, delivery may be performed by contacting a cell with an iRNA of the invention either in vitro or in vivo. In vivo delivery may also be performed directly by administering a composition comprising an iRNA, e.g., a dsRNA, to a subject. Alternatively, in vivo delivery may be performed indirectly by administering one or more vectors that encode and direct the expression of the iRNA. These alternatives are discussed further below.

[0501] In general, any method of delivering a nucleic acid molecule (in vitro or in vivo) can be adapted for use with an iRNA of the invention (see e.g., Akhtar S. and Julian RL. (1992) Trends Cell. Biol. 2(5):139-144 and WO94/02595, which are incorporated herein by reference in their entireties). For in vivo delivery, factors to consider in order to deliver an iRNA molecule include, for example, biological stability of the delivered molecule, prevention of non-specific effects, and accumulation of the delivered molecule in the target tissue. The non-specific effects of an iRNA can be minimized by local administration, for example, by direct injection or implantation into a tissue or topically administering the preparation. Local administration to a treatment site maximizes local concentration of the agent, limits the exposure of the agent to systemic tissues that can otherwise be harmed by the agent or that can degrade the agent, and permits a lower total dose of the iRNA molecule to be administered. Several studies have shown successful knockdown of gene products when an iRNA is administered locally. For example, intraocular delivery of a VEGF dsRNA by intravitreal injection in cynomolgus monkeys (Tolentino, M J., et al (2004) Retina 24:132-138) and subretinal injections in mice (Reich, S J., et al (2003) Mol. Vis. 9:210-216) were both shown to prevent neovascularization in an experimental model of age-related macular degeneration. In addition, direct intratumoral injection of a dsRNA in mice reduces tumor volume (Pille, J., et al (2005) Mol. Ther.11:267-274) and can prolong survival of tumor-bearing mice (Kim, W J., et al (2006) Mol. Ther. 14:343-350; Li, S., et al (2007) Mol. Ther. 15:515-523). RNA interference has also shown success with local delivery to the CNS by direct injection (Dorn, G., et al. (2004) Nucleic Acids 32:e49; Tan, P H., et al (2005) Gene Ther. 12:59-66; Makimura, H., et al (2002) BMC Neurosci. 3:18; Shishkina, G T., et al (2004) Neuroscience 129:521-528; Thakker, E R., et al (2004) Proc. Natl. Acad. Sci. U.S.A. 101:17270-17275; Akaneya,Y., et al (2005) J. Neurophysiol. 93:594-602) and to the lungs by intranasal administration (Howard, K A., et al (2006) Mol. Ther. 14:476-484; Zhang, X., et al (2004) J. Biol. Chem. 279:10677-10684; Bitko, V., et al (2005) Nat. Med. 11:50-55). For administering an iRNA systemically for the treatment of a disease, the RNA can be modified or alternatively delivered using a drug delivery system; both methods act to prevent the rapid degradation of the dsRNA by endo- and exo-nucleases in vivo. Modification of the RNA or the pharmaceutical carrier can also permit targeting of the iRNA composition to the target tissue and avoid undesirable off-target effects. iRNA molecules can be modified by chemical conjugation to lipophilic groups such as cholesterol to enhance cellular uptake and prevent degradation. For example, an iRNA directed against ApoB conjugated to a lipophilic cholesterol moiety was injected systemically into mice and resulted in knockdown of apoB mRNA in both the liver and jejunum (Soutschek, J., et al (2004) Nature 432:173-178). Conjugation of an iRNA to an aptamer has been shown to inhibit tumor growth and mediate tumor regression in a mouse model of prostate cancer (McNamara, J O., et al (2006) Nat. Biotechnol. 24:1005-1015). In an alternative embodiment, the iRNA can be delivered using drug delivery systems such as a nanoparticle, a dendrimer, a polymer, liposomes, or a cationic delivery system. Positively charged cationic delivery systems facilitate binding of an iRNA molecule (negatively charged) and also enhance interactions at the negatively charged cell membrane to permit efficient uptake of an iRNA by the cell. Cationic lipids, dendrimers, or polymers can either be bound to an iRNA, or induced to form a vesicle or micelle (see e.g., Kim SH., et al (2008) Journal of Controlled Release 129(2):107-116) that encases an iRNA. The formation of vesicles or micelles further prevents degradation of the iRNA when administered systemically. Methods for making and administering cationic-iRNA complexes are well within the abilities of one skilled in the art (see e.g., Sorensen, D R., et al (2003) J. Mol. Biol 327:761-766; Verma, U N., et al (2003) Clin. Cancer Res. 9:1291-1300; Arnold, A S et al (2007) J. Hypertens. 25:197-205, which are incorporated herein by reference in their entirety). Some non-limiting examples of drug delivery systems useful for systemic delivery of iRNAs include DOTAP (Sorensen, D R., et al (2003), supra; Verma, U N., et al (2003), supra), Oligofectamine, “solid nucleic acid lipid particles” (Zimmermann, T S., et al (2006) Nature 441:111-114), cardiolipin (Chien, P Y., et al (2005) Cancer Gene Ther. 12:321-328; Pal, A., et al (2005) Int J. Oncol. 26:1087-1091), polyethyleneimine (Bonnet ME., et al (2008) Pharm. Res. August 16 Epub ahead of print; Aigner, A. (2006) J. Biomed. Biotechnol. 71659), Arg-Gly-Asp (RGD) peptides (Liu, S. (2006) Mol. Pharm. 3:472-487), and polyamidoamines (Tomalia, D A., et al (2007) Biochem. Soc. Trans. 35:61-67; Yoo, H., et al (1999) Pharm. Res. 16:1799-1804). In some embodiments, an iRNA forms a complex with cyclodextrin for systemic administration. Methods for administration and pharmaceutical compositions of iRNAs and cyclodextrins can be found in U.S. Pat. No. 7,427,605, which is herein incorporated by reference in its entirety.

A. Vector Encoded iRNAs of the Invention

[0502] iRNA targeting a contact activation pathway gene can be expressed from transcription units inserted into DNA or RNA vectors (see, e.g., Couture, A, et al., TIG. (1996), 12:5-10; Skillern, A., et al., International PCT Publication No. WO 00/22113, Conrad, International PCT Publication No. WO 00/22114, and Conrad, U.S. Pat. No. 6,054,299). Expression can be transient (on the order of hours to weeks) or sustained (weeks to months or longer), depending upon the specific construct used and the target tissue or cell type. These transgenes can be introduced as a linear construct, a circular plasmid, or a viral vector, which can be an integrating or non-integrating vector. The transgene can also be constructed to permit it to be inherited as an extrachromosomal plasmid (Gassmann, et al., Proc. Natl. Acad. Sci. USA (1995) 92:1292).

[0503] The individual strand or strands of an iRNA can be transcribed from a promoter on an expression vector. Where two separate strands are to be expressed to generate, for example, a dsRNA, two separate expression vectors can be co-introduced (e.g., by transfection or infection) into a target cell. Alternatively each individual strand of a dsRNA can be transcribed by promoters both of which are located on the same expression plasmid. In one embodiment, a dsRNA is expressed as inverted repeat polynucleotides joined by a linker polynucleotide sequence such that the dsRNA has a stem and loop structure.

[0504] iRNA expression vectors are generally DNA plasmids or viral vectors. Expression vectors compatible with eukaryotic cells, preferably those compatible with vertebrate cells, can be used to produce recombinant constructs for the expression of an iRNA as described herein. Eukaryotic cell expression vectors are well known in the art and are available from a number of commercial sources. Typically, such vectors are provided containing convenient restriction sites for insertion of the desired nucleic acid segment. Delivery of iRNA expressing vectors can be systemic, such as by intravenous or intramuscular administration, by administration to target cells ex-planted from the patient followed by reintroduction into the patient, or by any other means that allows for introduction into a desired target cell.

[0505] iRNA expression plasmids can be transfected into target cells as a complex with cationic lipid carriers (e.g., Oligofectamine) or non-cationic lipid-based carriers (e.g., Transit-TKO^{T}′). Multiple lipid transfections for iRNA-mediated knockdowns targeting different regions of a target RNA over a period of a week or more are also contemplated by the invention. Successful introduction of vectors into host cells can be monitored using various known methods. For example, transient transfection can be signaled with a reporter, such as a fluorescent marker, such as Green Fluorescent Protein (GFP). Stable transfection of cells ex vivo can be ensured using markers that provide the transfected cell with resistance to specific environmental factors (e.g., antibiotics and drugs), such as hygromycin B resistance.

[0506] Viral vector systems which can be utilized with the methods and compositions described herein include, but are not limited to, (a) adenovirus vectors; (b) retrovirus vectors, including but not limited to lentiviral vectors, moloney murine leukemia virus, etc.; (c) adeno-associated virus vectors; (d) herpes simplex virus vectors; (e) SV 40 vectors; (f) polyoma virus vectors; (g) papilloma virus vectors; (h) picornavirus vectors; (i) pox virus vectors such as an orthopox, e.g., vaccinia virus vectors or avipox, e.g. canary pox or fowl pox; and (j) a helper-dependent or gutless adenovirus. Replication-defective viruses can also be advantageous. Different vectors will or will not become incorporated into the cells' genome. The constructs can include viral sequences for transfection, if desired. Alternatively, the construct can be incorporated into vectors capable of episomal replication, e.g. EPV and EBV vectors. Constructs for the recombinant expression of an iRNA will generally require regulatory elements, e.g., promoters, enhancers, etc., to ensure the expression of the iRNA in target cells. Other aspects to consider for vectors and constructs are further described below.

[0507] Vectors useful for the delivery of an iRNA will include regulatory elements (promoter, enhancer, etc.) sufficient for expression of the iRNA in the desired target cell or tissue. The regulatory elements can be chosen to provide either constitutive or regulated/inducible expression.

[0508] Expression of the iRNA can be precisely regulated, for example, by using an inducible regulatory sequence that is sensitive to certain physiological regulators, e.g., circulating glucose levels, or hormones (Docherty et al., 1994, FASEB J. 8:20-24). Such inducible expression systems, suitable for the control of dsRNA expression in cells or in mammals include, for example, regulation by ecdysone, by estrogen, progesterone, tetracycline, chemical inducers of dimerization, and isopropyl-beta-D1-thiogalactopyranoside (IPTG). A person skilled in the art would be able to choose the appropriate regulatory/promoter sequence based on the intended use of the iRNA transgene.

[0509] Viral vectors that contain nucleic acid sequences encoding an iRNA can be used. For example, a retroviral vector can be used (see Miller et al., Meth. Enzymol. 217:581-599 (1993)). These retroviral vectors contain the components necessary for the correct packaging of the viral genome and integration into the host cell DNA. The nucleic acid sequences encoding an iRNA are cloned into one or more vectors, which facilitate delivery of the nucleic acid into a patient. More detail about retroviral vectors can be found, for example, in Boesen et al., Biotherapy 6:291-302 (1994), which describes the use of a retroviral vector to deliver the mdr1 gene to hematopoietic stem cells in order to make the stem cells more resistant to chemotherapy. Other references illustrating the use of retroviral vectors in gene therapy are: Clowes et al., J. Clin. Invest. 93:644-651 (1994); Kiem et al., Blood 83:1467-1473 (1994); Salmons and Gunzberg, Human Gene Therapy 4:129-141 (1993); and Grossman and Wilson, Curr. Opin. in Genetics and Devel. 3:110-114 (1993). Lentiviral vectors contemplated for use include, for example, the HIV based vectors described in U.S. Pat. Nos. 6,143,520; 5,665,557; and 5,981,276, which are herein incorporated by reference.

[0510] Adenoviruses are also contemplated for use in delivery of iRNAs of the invention. Adenoviruses are especially attractive vehicles, e.g., for delivering genes to respiratory epithelia. Adenoviruses naturally infect respiratory epithelia where they cause a mild disease. Other targets for adenovirus-based delivery systems are liver, the central nervous system, endothelial cells, and muscle. Adenoviruses have the advantage of being capable of infecting non-dividing cells. Kozarsky and Wilson, Current Opinion in Genetics and Development 3:499-503 (1993) present a review of adenovirus-based gene therapy. Bout et al., Human Gene Therapy 5:3-10 (1994) demonstrated the use of adenovirus vectors to transfer genes to the respiratory epithelia of rhesus monkeys. Other instances of the use of adenoviruses in gene therapy can be found in Rosenfeld et al., Science 252:431-434 (1991); Rosenfeld et al., Cell 68:143-155 (1992); Mastrangeli et al., J. Clin. Invest. 91:225-234 (1993); PCT Publication WO94/12649; and Wang, et al., Gene Therapy 2:775-783 (1995). A suitable AV vector for expressing an iRNA featured in the invention, a method for constructing the recombinant AV vector, and a method for delivering the vector into target cells, are described in Xia H et al. (2002), Nat. Biotech. 20: 1006-1010.

[0511] Adeno-associated virus (AAV) vectors may also be used to delivery an iRNA of the invention (Walsh et al., Proc. Soc. Exp. Biol. Med. 204:289-300 (1993); U.S. Pat. No. 5,436,146). In one embodiment, the iRNA can be expressed as two separate, complementary single-stranded RNA molecules from a recombinant AAV vector having, for example, either the U6 or H1 RNA promoters, or the cytomegalovirus (CMV) promoter. Suitable AAV vectors for expressing the dsRNA featured in the invention, methods for constructing the recombinant AV vector, and methods for delivering the vectors into target cells are described in Samulski R et al. (1987), J. Virol. 61: 3096-3101; Fisher K J et al. (1996), J. Virol, 70: 520-532; Samulski R et al. (1989), J. Virol. 63: 3822-3826; U.S. Pat. Nos. 5,252,479; 5,139,941; International Patent Application No. WO 94/13788; and International Patent Application No. WO 93/24641, the entire disclosures of which are herein incorporated by reference.

[0512] Another viral vector suitable for delivery of an iRNA of the inevtion is a pox virus such as a vaccinia virus, for example an attenuated vaccinia such as Modified Virus Ankara (MVA) or NYVAC, an avipox such as fowl pox or canary pox.

[0513] The tropism of viral vectors can be modified by pseudotyping the vectors with envelope proteins or other surface antigens from other viruses, or by substituting different viral capsid proteins, as appropriate. For example, lentiviral vectors can be pseudotyped with surface proteins from vesicular stomatitis virus (VSV), rabies, Ebola, Mokola, and the like. AAV vectors can be made to target different cells by engineering the vectors to express different capsid protein serotypes; see, e.g., Rabinowitz J E et al. (2002), J Virol 76:791-801, the entire disclosure of which is herein incorporated by reference.

[0514] The pharmaceutical preparation of a vector can include the vector in an acceptable diluent, or can include a slow release matrix in which the gene delivery vehicle is imbedded. Alternatively, where the complete gene delivery vector can be produced intact from recombinant cells, e.g., retroviral vectors, the pharmaceutical preparation can include one or more cells which produce the gene delivery system.

### VIII. Pharmaceutical Compositions of the Invention

[0515] The present invention also includes pharmaceutical compositions and formulations which include the iRNAs of the invention. In one embodiment, provided herein are pharmaceutical compositions containing an iRNA, as described herein, and a pharmaceutically acceptable carrier. The pharmaceutical compositions containing the iRNA are useful for treating a disease or disorder associated with the expression or activity of a contact activation pathway gene (i.e., an F12 gene). Such pharmaceutical compositions are formulated based on the mode of delivery. One example is compositions that are formulated for systemic administration via parenteral delivery, e.g., by subcutaneous (SC), intramuscular (IM), or intravenous (IV) delivery. Another example is compositions that are formulated for direct delivery into the brain parenchyma, e.g., by infusion into the brain, such as by continuous pump infusion. The pharmaceutical compositions of the invention may be administered in dosages sufficient to inhibit expression of a contact activation pathway gene.

[0516] Such pharmaceutical compositions are formulated based on the mode of delivery. One example is compositions that are formulated for systemic administration via parenteral delivery, e.g., by intravenous (IV) or for subcutaneous delivery. Another example is compositions that are formulated for direct delivery into the liver, e.g., by infusion into the liver, such as by continuous pump infusion.

[0517] The pharmaceutical compositions of the invention may be administered in dosages sufficient to inhibit expression of a contact activation pathway gene. In general, a suitable dose of an iRNA of the invention will be in the range of about 0.001 to about 200.0 milligrams per kilogram body weight of the recipient per day, generally in the range of about 1 to 50 mg per kilogram body weight per day. Typically, a suitable dose of an iRNA of the invention will be in the range of about 0.1 mg/kg to about 5.0 mg/kg, preferably about 0.3 mg/kg and about 3.0 mg/kg. A repeat-dose regimine may include administration of a therapeutic amount of iRNA on a regular basis, such as every other day or once a year. In certain embodiments, the iRNA is administered about once per month to about once per quarter (i.e., about once every three months).

[0518] After an initial treatment regimen, the treatments can be administered on a less frequent basis.

[0519] The skilled artisan will appreciate that certain factors can influence the dosage and timing required to effectively treat a subject, including but not limited to the severity of the disease or disorder, previous treatments, the general health and/or age of the subject, and other diseases present. Moreover, treatment of a subject with a therapeutically effective amount of a composition can include a single treatment or a series of treatments. Estimates of effective dosages and in vivo half-lives for the individual iRNAs encompassed by the invention can be made using conventional methodologies or on the basis of in vivo testing using an appropriate animal model, as described elsewhere herein.

[0520] Advances in mouse genetics have generated a number of mouse models for the study of various human diseases, such as disorders that would benefit from reduction in the expression of a contact activation pathway gene.

[0521] The pharmaceutical compositions of the present invention can be administered in a number of ways depending upon whether local or systemic treatment is desired and upon the area to be treated. Administration can be topical (e.g., by a transdermal patch), pulmonary, e.g., by inhalation or insufflation of powders or aerosols, including by nebulizer; intratracheal, intranasal, epidermal and transdermal, oral or parenteral. Parenteral administration includes intravenous, intraarterial, subcutaneous, intraperitoneal or intramuscular injection or infusion; subdermal, e.g., via an implanted device; or intracranial, e.g., by intraparenchymal, intrathecal or intraventricular, administration.

[0522] The iRNA can be delivered in a manner to target a particular tissue, such as the liver (e.g., the hepatocytes of the liver).

[0523] Pharmaceutical compositions and formulations for topical administration can include transdermal patches, ointments, lotions, creams, gels, drops, suppositories, sprays, liquids, and powders. Conventional pharmaceutical carriers, aqueous, powder, or oily bases, thickeners and the like can be necessary or desirable. Coated condoms, gloves and the like can also be useful. Suitable topical formulations include those in which the iRNAs featured in the invention are in admixture with a topical delivery agent such as lipids, liposomes, fatty acids, fatty acid esters, steroids, chelating agents, and surfactants. Suitable lipids and liposomes include neutral (e.g., dioleoylphosphatidyl DOPE ethanolamine, dimyristoylphosphatidyl choline DMPC, distearolyphosphatidyl choline), negative (e.g., dimyristoylphosphatidyl glycerol DMPG), and cationic (e.g., dioleoyltetramethylaminopropyl DOTAP and dioleoylphosphatidyl ethanolamine DOTMA). iRNAs featured in the invention can be encapsulated within liposomes or can form complexes thereto, in particular to cationic liposomes. Alternatively, iRNAs can be complexed to lipids, in particular to cationic lipids. Suitable fatty acids and esters include but are not limited to arachidonic acid, oleic acid, eicosanoic acid, lauric acid, caprylic acid, capric acid, myristic acid, palmitic acid, stearic acid, linoleic acid, linolenic acid, dicaprate, tricaprate, monoolein, dilaurin, glyceryl 1-monocaprate, 1-dodecylazacycloheptan-2-one, an acylcarnitine, an acylcholine, or a C₁₋₂₀ alkyl ester (e.g., isopropylmyristate IPM), monoglyceride or diglyceride; or pharmaceutically acceptable salt thereof. Topical formulations are described in detail in U.S. Pat. No. 6,747,014, which is incorporated herein by reference.

[0524] A. iRNA Formulations Comprising Membranous Molecular Assemblies An iRNA for use in the compositions and methods of the invention can be formulated for delivery in a membranous molecular assembly, e.g., a liposome or a micelle. As used herein, the term “liposome” refers to a vesicle composed of amphiphilic lipids arranged in at least one bilayer, e.g., one bilayer or a plurality of bilayers. Liposomes include unilamellar and multilamellar vesicles that have a membrane formed from a lipophilic material and an aqueous interior. The aqueous portion contains the iRNA composition. The lipophilic material isolates the aqueous interior from an aqueous exterior, which typically does not include the iRNA composition, although in some examples, it may. Liposomes are useful for the transfer and delivery of active ingredients to the site of action. Because the liposomal membrane is structurally similar to biological membranes, when liposomes are applied to a tissue, the liposomal bilayer fuses with bilayer of the cellular membranes. As the merging of the liposome and cell progresses, the internal aqueous contents that include the iRNA are delivered into the cell where the iRNA can specifically bind to a target RNA and can mediate iRNA. In some cases the liposomes are also specifically targeted, e.g., to direct the iRNA to particular cell types.

[0525] A liposome containing an iRNA agent can be prepared by a variety of methods. In one example, the lipid component of a liposome is dissolved in a detergent so that micelles are formed with the lipid component. For example, the lipid component can be an amphipathic cationic lipid or lipid conjugate. The detergent can have a high critical micelle concentration and may be nonionic. Exemplary detergents include cholate, CHAPS, octylglucoside, deoxycholate, and lauroyl sarcosine. The iRNA agent preparation is then added to the micelles that include the lipid component. The cationic groups on the lipid interact with the iRNA agent and condense around the iRNA agent to form a liposome. After condensation, the detergent is removed, e.g., by dialysis, to yield a liposomal preparation of iRNA agent.

[0526] If necessary a carrier compound that assists in condensation can be added during the condensation reaction, e.g., by controlled addition. For example, the carrier compound can be a polymer other than a nucleic acid (e.g., spermine or spermidine). pH can also adjusted to favor condensation.

[0527] Methods for producing stable polynucleotide delivery vehicles, which incorporate a polynucleotide/cationic lipid complex as structural components of the delivery vehicle, are further described in, e.g., WO 96/37194, the entire contents of which are incorporated herein by reference. Liposome formation can also include one or more aspects of exemplary methods described in Felgner, P. L. et al., Proc. Natl. Acad. Sci., USA 8:7413-7417, 1987; U.S. Pat. Nos. 4,897,355; 5,171,678; Bangham, et al. M. Mol. Biol. 23:238, 1965; Olson, et al. Biochim. Biophys. Acta 557:9, 1979; Szoka, et al. Proc. Natl. Acad. Sci. 75: 4194, 1978; Mayhew, et al. Biochim. Biophys. Acta 775:169, 1984; Kim, et al. Biochim. Biophys. Acta 728:339, 1983; and Fukunaga, et al. Endocrinol. 115:757, 1984. Commonly used techniques for preparing lipid aggregates of appropriate size for use as delivery vehicles include sonication and freeze-thaw plus extrusion (see, e.g., Mayer, et al. Biochim. Biophys. Acta 858:161, 1986). Microfluidization can be used when consistently small (50 to 200 nm) and relatively uniform aggregates are desired (Mayhew, et al. Biochim. Biophys. Acta 775:169, 1984). These methods are readily adapted to packaging iRNA agent preparations into liposomes.

[0528] Liposomes fall into two broad classes. Cationic liposomes are positively charged liposomes which interact with the negatively charged nucleic acid molecules to form a stable complex. The positively charged nucleic acid/liposome complex binds to the negatively charged cell surface and is internalized in an endosome. Due to the acidic pH within the endosome, the liposomes are ruptured, releasing their contents into the cell cytoplasm (Wang et al., Biochem. Biophys. Res. Commun., 1987, 147, 980-985).

[0529] Liposomes which are pH-sensitive or negatively-charged, entrap nucleic acids rather than complex with it. Since both the nucleic acid and the lipid are similarly charged, repulsion rather than complex formation occurs. Nevertheless, some nucleic acid is entrapped within the aqueous interior of these liposomes. pH-sensitive liposomes have been used to deliver nucleic acids encoding the thymidine kinase gene to cell monolayers in culture. Expression of the exogenous gene was detected in the target cells (Zhou et al., Journal of Controlled Release, 1992, 19, 269-274).

[0530] One major type of liposomal composition includes phospholipids other than naturally-derived phosphatidylcholine. Neutral liposome compositions, for example, can be formed from dimyristoyl phosphatidylcholine (DMPC) or dipalmitoyl phosphatidylcholine (DPPC). Anionic liposome compositions generally are formed from dimyristoyl phosphatidylglycerol, while anionic fusogenic liposomes are formed primarily from dioleoyl phosphatidylethanolamine (DOPE). Another type of liposomal composition is formed from phosphatidylcholine (PC) such as, for example, soybean PC, and egg PC. Another type is formed from mixtures of phospholipid and/or phosphatidylcholine and/or cholesterol.

[0531] Examples of other methods to introduce liposomes into cells in vitro and in vivo include U.S. Pat. Nos. 5,283,185; 5,171,678; WO 94/00569; WO 93/24640; WO 91/16024; Felgner, J. Biol. Chem. 269:2550, 1994; Nabel, Proc. Natl. Acad. Sci. 90:11307, 1993; Nabel, Human Gene Ther. 3:649, 1992; Gershon, Biochem. 32:7143, 1993; and Strauss EMBO J. 11:417, 1992.

[0532] Non-ionic liposomal systems have also been examined to determine their utility in the delivery of drugs to the skin, in particular systems comprising non-ionic surfactant and cholesterol. Non-ionic liposomal formulations comprising Novasome™ I (glyceryl dilaurate/cholesterol/polyoxyethylene-10-stearyl ether) and Novasome™ II (glyceryl distearate/cholesterol/polyoxyethylene-10-stearyl ether) were used to deliver cyclosporin-A into the dermis of mouse skin. Results indicated that such non-ionic liposomal systems were effective in facilitating the deposition of cyclosporine A into different layers of the skin (Hu et al. S.T.P.Pharma. Sci., 1994, 4(6) 466).

[0533] Liposomes also include “sterically stabilized” liposomes, a term which, as used herein, refers to liposomes comprising one or more specialized lipids that, when incorporated into liposomes, result in enhanced circulation lifetimes relative to liposomes lacking such specialized lipids. Examples of sterically stabilized liposomes are those in which part of the vesicle-forming lipid portion of the liposome (A) comprises one or more glycolipids, such as monosialoganglioside G_{M1}, or (B) is derivatized with one or more hydrophilic polymers, such as a polyethylene glycol (PEG) moiety. While not wishing to be bound by any particular theory, it is thought in the art that, at least for sterically stabilized liposomes containing gangliosides, sphingomyelin, or PEG-derivatized lipids, the enhanced circulation half-life of these sterically stabilized liposomes derives from a reduced uptake into cells of the reticuloendothelial system (RES) (Allen et al., FEBS Letters, 1987, 223, 42; Wu et al., Cancer Research, 1993, 53, 3765).

[0534] Various liposomes comprising one or more glycolipids are known in the art. Papahadjopoulos et al. (Ann. N.Y. Acad. Sci., 1987, 507, 64) reported the ability of monosialoganglioside G_{M1}, galactocerebroside sulfate and phosphatidylinositol to improve blood half-lives of liposomes. These findings were expounded upon by Gabizon et al. (Proc. Natl. Acad. Sci. U.S.A., 1988, 85, 6949). U.S. Pat. No. 4,837,028 and WO 88/04924, both to Allen et al., disclose liposomes comprising (1) sphingomyelin and (2) the ganglioside G_{M1} or a galactocerebroside sulfate ester. U.S. Pat. No. 5,543,152 (Webb et al.) discloses liposomes comprising sphingomyelin. Liposomes comprising 1,2-sn-dimyristoylphosphatidylcholine are disclosed in WO 97/13499 (Lim et al).

[0535] In one embodiment, cationic liposomes are used. Cationic liposomes possess the advantage of being able to fuse to the cell membrane. Non-cationic liposomes, although not able to fuse as efficiently with the plasma membrane, are taken up by macrophages in vivo and can be used to deliver iRNA agents to macrophages.

[0536] Further advantages of liposomes include: liposomes obtained from natural phospholipids are biocompatible and biodegradable; liposomes can incorporate a wide range of water and lipid soluble drugs; liposomes can protect encapsulated iRNA agents in their internal compartments from metabolism and degradation (Rosoff, in “Pharmaceutical Dosage Forms,” Lieberman, Rieger and Banker (Eds.), 1988, volume 1, p. 245). Important considerations in the preparation of liposome formulations are the lipid surface charge, vesicle size and the aqueous volume of the liposomes.

[0537] A positively charged synthetic cationic lipid, N-[1-(2,3-dioleyloxy)propyl]-N,N,N-trimethylammonium chloride (DOTMA) can be used to form small liposomes that interact spontaneously with nucleic acid to form lipid-nucleic acid complexes which are capable of fusing with the negatively charged lipids of the cell membranes of tissue culture cells, resulting in delivery of iRNA agent (see, e.g., Felgner, P. L. et al., Proc. Natl. Acad. Sci., USA 8:7413-7417, 1987 and U.S. Pat. No. 4,897,355 for a description of DOTMA and its use with DNA).

[0538] A DOTMA analogue, 1,2-bis(oleoyloxy)-3-(trimethylammonia)propane (DOTAP) can be used in combination with a phospholipid to form DNA-complexing vesicles. Lipofectin™ Bethesda Research Laboratories, Gaithersburg, Md.) is an effective agent for the delivery of highly anionic nucleic acids into living tissue culture cells that comprise positively charged DOTMA liposomes which interact spontaneously with negatively charged polynucleotides to form complexes. When enough positively charged liposomes are used, the net charge on the resulting complexes is also positive. Positively charged complexes prepared in this way spontaneously attach to negatively charged cell surfaces, fuse with the plasma membrane, and efficiently deliver functional nucleic acids into, for example, tissue culture cells. Another commercially available cationic lipid, 1,2-bis(oleoyloxy)-3,3-(trimethylammonia)propane (“DOTAP”) (Boehringer Mannheim, Indianapolis, Indiana) differs from DOTMA in that the oleoyl moieties are linked by ester, rather than ether linkages.

[0539] Other reported cationic lipid compounds include those that have been conjugated to a variety of moieties including, for example, carboxyspermine which has been conjugated to one of two types of lipids and includes compounds such as 5-carboxyspermylglycine dioctaoleoylamide (“DOGS”) (Transfectam™, Promega, Madison, Wisconsin) and dipalmitoylphosphatidylethanolamine 5-carboxyspermyl-amide (“DPPES”) (see, e.g., U.S. Pat. No. 5,171,678).

[0540] Another cationic lipid conjugate includes derivatization of the lipid with cholesterol (“DC-Chol”) which has been formulated into liposomes in combination with DOPE (See, Gao, X. and Huang, L., Biochim. Biophys. Res. Commun. 179:280, 1991). Lipopolylysine, made by conjugating polylysine to DOPE, has been reported to be effective for transfection in the presence of serum (Zhou, X. et al., Biochim. Biophys. Acta 1065:8, 1991). For certain cell lines, these liposomes containing conjugated cationic lipids, are said to exhibit lower toxicity and provide more efficient transfection than the DOTMA-containing compositions. Other commercially available cationic lipid products include DMRIE and DMRIE-HP (Vical, La Jolla, California) and Lipofectamine (DOSPA) (Life Technology, Inc., Gaithersburg, Maryland). Other cationic lipids suitable for the delivery of oligonucleotides are described in WO 98/39359 and WO 96/37194.

[0541] Liposomal formulations are particularly suited for topical administration, liposomes present several advantages over other formulations. Such advantages include reduced side effects related to high systemic absorption of the administered drug, increased accumulation of the administered drug at the desired target, and the ability to administer iRNA agent into the skin. In some implementations, liposomes are used for delivering iRNA agent to epidermal cells and also to enhance the penetration of iRNA agent into dermal tissues, e.g., into skin. For example, the liposomes can be applied topically. Topical delivery of drugs formulated as liposomes to the skin has been documented (see, e.g., Weiner et al., Journal of Drug Targeting, 1992, vol. 2,405-410 and du Plessis et al., Antiviral Research, 18, 1992, 259-265; Mannino, R. J. and Fould-Fogerite, S., Biotechniques 6:682-690, 1988; Itani, T. et al. Gene 56:267-276. 1987; Nicolau, C. et al. Meth. Enz. 149:157-176, 1987; Straubinger, R. M. and Papahadjopoulos, D. Meth. Enz. 101:512-527, 1983; Wang, C. Y. and Huang, L., Proc. Natl. Acad. Sci. USA 84:7851-7855, 1987).

[0542] Non-ionic liposomal systems have also been examined to determine their utility in the delivery of drugs to the skin, in particular systems comprising non-ionic surfactant and cholesterol. Non-ionic liposomal formulations comprising Novasome I (glyceryl dilaurate/cholesterol/polyoxyethylene-10-stearyl ether) and Novasome II (glyceryl distearate/cholesterol/polyoxyethylene-10-stearyl ether) were used to deliver a drug into the dermis of mouse skin. Such formulations with iRNA agent are useful for treating a dermatological disorder.

[0543] Liposomes that include iRNA can be made highly deformable. Such deformability can enable the liposomes to penetrate through pore that are smaller than the average radius of the liposome. For example, transfersomes are a type of deformable liposomes. Transferosomes can be made by adding surface edge activators, usually surfactants, to a standard liposomal composition. Transfersomes that include iRNA agent can be delivered, for example, subcutaneously by infection in order to deliver iRNA agent to keratinocytes in the skin. In order to cross intact mammalian skin, lipid vesicles must pass through a series of fine pores, each with a diameter less than 50 nm, under the influence of a suitable transdermal gradient. In addition, due to the lipid properties, these transferosomes can be self-optimizing (adaptive to the shape of pores, e.g., in the skin), self-repairing, and can frequently reach their targets without fragmenting, and often self-loading.

[0544] Other formulations amenable to the present invention are described in U.S. provisional application Ser. No. 61/018,616, filed Jan. 2, 2008; 61/018,611, filed Jan. 2, 2008; 61/039,748, filed Mar. 26, 2008; 61/047,087, filed Apr. 22, 2008 and 61/051,528, filed May 8, 2008. PCT application no PCT/US2007/080331, filed Oct. 3, 2007 also describes formulations that are amenable to the present invention.

[0545] Transfersomes are yet another type of liposomes, and are highly deformable lipid aggregates which are attractive candidates for drug delivery vehicles. Transfersomes can be described as lipid droplets which are so highly deformable that they are easily able to penetrate through pores which are smaller than the droplet. Transfersomes are adaptable to the environment in which they are used, e.g., they are self-optimizing (adaptive to the shape of pores in the skin), self-repairing, frequently reach their targets without fragmenting, and often self-loading. To make transfersomes it is possible to add surface edge-activators, usually surfactants, to a standard liposomal composition. Transfersomes have been used to deliver serum albumin to the skin. The transfersome-mediated delivery of serum albumin has been shown to be as effective as subcutaneous injection of a solution containing serum albumin.

[0546] Surfactants find wide application in formulations such as emulsions (including microemulsions) and liposomes. The most common way of classifying and ranking the properties of the many different types of surfactants, both natural and synthetic, is by the use of the hydrophile/lipophile balance (HLB). The nature of the hydrophilic group (also known as the “head”) provides the most useful means for categorizing the different surfactants used in formulations (Rieger, in “Pharmaceutical Dosage Forms”, Marcel Dekker, Inc., New York, N.Y., 1988, p. 285).

[0547] If the surfactant molecule is not ionized, it is classified as a nonionic surfactant. Nonionic surfactants find wide application in pharmaceutical and cosmetic products and are usable over a wide range of pH values. In general their HLB values range from 2 to about 18 depending on their structure. Nonionic surfactants include nonionic esters such as ethylene glycol esters, propylene glycol esters, glyceryl esters, polyglyceryl esters, sorbitan esters, sucrose esters, and ethoxylated esters. Nonionic alkanolamides and ethers such as fatty alcohol ethoxylates, propoxylated alcohols, and ethoxylated/propoxylated block polymers are also included in this class. The polyoxyethylene surfactants are the most popular members of the nonionic surfactant class.

[0548] If the surfactant molecule carries a negative charge when it is dissolved or dispersed in water, the surfactant is classified as anionic. Anionic surfactants include carboxylates such as soaps, acyl lactylates, acyl amides of amino acids, esters of sulfuric acid such as alkyl sulfates and ethoxylated alkyl sulfates, sulfonates such as alkyl benzene sulfonates, acyl isethionates, acyl taurates and sulfosuccinates, and phosphates. The most important members of the anionic surfactant class are the alkyl sulfates and the soaps.

[0549] If the surfactant molecule carries a positive charge when it is dissolved or dispersed in water, the surfactant is classified as cationic. Cationic surfactants include quaternary ammonium salts and ethoxylated amines. The quaternary ammonium salts are the most used members of this class.

[0550] If the surfactant molecule has the ability to carry either a positive or negative charge, the surfactant is classified as amphoteric. Amphoteric surfactants include acrylic acid derivatives, substituted alkylamides, N-alkylbetaines and phosphatides.

[0551] The use of surfactants in drug products, formulations and in emulsions has been reviewed (Rieger, in “Pharmaceutical Dosage Forms”, Marcel Dekker, Inc., New York, N.Y., 1988, p. 285).

[0552] The iRNA for use in the methods of the invention can also be provided as micellar formulations. “Micelles” are defined herein as a particular type of molecular assembly in which amphipathic molecules are arranged in a spherical structure such that all the hydrophobic portions of the molecules are directed inward, leaving the hydrophilic portions in contact with the surrounding aqueous phase. The converse arrangement exists if the environment is hydrophobic.

[0553] A mixed micellar formulation suitable for delivery through transdermal membranes may be prepared by mixing an aqueous solution of the siRNA composition, an alkali metal C₈ to C₂₂ alkyl sulphate, and a micelle forming compounds. Exemplary micelle forming compounds include lecithin, hyaluronic acid, pharmaceutically acceptable salts of hyaluronic acid, glycolic acid, lactic acid, chamomile extract, cucumber extract, oleic acid, linoleic acid, linolenic acid, monoolein, monooleates, monolaurates, borage oil, evening of primrose oil, menthol, trihydroxy oxo cholanyl glycine and pharmaceutically acceptable salts thereof, glycerin, polyglycerin, lysine, polylysine, triolein, polyoxyethylene ethers and analogues thereof, polidocanol alkyl ethers and analogues thereof, chenodeoxycholate, deoxycholate, and mixtures thereof. The micelle forming compounds may be added at the same time or after addition of the alkali metal alkyl sulphate. Mixed micelles will form with substantially any kind of mixing of the ingredients but vigorous mixing in order to provide smaller size micelles.

[0554] In one method a first micellar composition is prepared which contains the siRNA composition and at least the alkali metal alkyl sulphate. The first micellar composition is then mixed with at least three micelle forming compounds to form a mixed micellar composition. In another method, the micellar composition is prepared by mixing the siRNA composition, the alkali metal alkyl sulphate and at least one of the micelle forming compounds, followed by addition of the remaining micelle forming compounds, with vigorous mixing.

[0555] Phenol and/or m-cresol may be added to the mixed micellar composition to stabilize the formulation and protect against bacterial growth. Alternatively, phenol and/or m-cresol may be added with the micelle forming ingredients. An isotonic agent such as glycerin may also be added after formation of the mixed micellar composition.

[0556] For delivery of the micellar formulation as a spray, the formulation can be put into an aerosol dispenser and the dispenser is charged with a propellant. The propellant, which is under pressure, is in liquid form in the dispenser. The ratios of the ingredients are adjusted so that the aqueous and propellant phases become one, i.e., there is one phase. If there are two phases, it is necessary to shake the dispenser prior to dispensing a portion of the contents, e.g., through a metered valve. The dispensed dose of pharmaceutical agent is propelled from the metered valve in a fine spray.

[0557] Propellants may include hydrogen-containing chlorofluorocarbons, hydrogen-containing fluorocarbons, dimethyl ether and diethyl ether. In certain embodiments, HFA 134a (1,1,1,2 tetrafluoroethane) may be used.

[0558] The specific concentrations of the essential ingredients can be determined by relatively straightforward experimentation. For absorption through the oral cavities, it is often desirable to increase, e.g., at least double or triple, the dosage for through injection or administration through the gastrointestinal tract.

### B. Lipid Particles

[0559] iRNAs, e.g., dsRNAs of in the invention may be fully encapsulated in a lipid formulation, e.g., a LNP, or other nucleic acid-lipid particle.

[0560] As used herein, the term “LNP” refers to a stable nucleic acid-lipid particle. LNPs typically contain a cationic lipid, a non-cationic lipid, and a lipid that prevents aggregation of the particle (e.g., a PEG-lipid conjugate). LNPs are extremely useful for systemic applications, as they exhibit extended circulation lifetimes following intravenous (i.v.) injection and accumulate at distal sites (e.g., sites physically separated from the administration site). LNPs include “pSPLP,” which include an encapsulated condensing agent-nucleic acid complex as set forth in PCT Publication No. WO 00/03683. The particles of the present invention typically have a mean diameter of about 50 nm to about 150 nm, more typically about 60 nm to about 130 nm, more typically about 70 nm to about 110 nm, most typically about 70 nm to about 90 nm, and are substantially nontoxic. In addition, the nucleic acids when present in the nucleic acid-lipid particles of the present invention are resistant in aqueous solution to degradation with a nuclease. Nucleic acid-lipid particles and their method of preparation are disclosed in, e.g., U.S. Pat. Nos. 5,976,567; 5,981,501; 6,534,484; 6,586,410; 6,815,432; U.S. Publication No. 2010/0324120 and PCT Publication No. WO 96/40964.

[0561] In one embodiment, the lipid to drug ratio (mass/mass ratio) (e.g., lipid to dsRNA ratio) will be in the range of from about 1:1 to about 50:1, from about 1:1 to about 25:1, from about 3:1 to about 15:1, from about 4:1 to about 10:1, from about 5:1 to about 9:1, or about 6:1 to about 9:1. Ranges intermediate to the above recited ranges are also contemplated to be part of the invention.

[0562] The cationic lipid can be, for example, N,N-dioleyl-N,N-dimethylammonium chloride (DODAC), N,N-distearyl-N,N-dimethylammonium bromide (DDAB), N-(I-(2,3-dioleoyloxy)propyl)-N,N,N-trimethylammonium chloride (DOTAP), N-(I-(2,3-dioleyloxy)propyl)-N,N,N-trimethylammonium chloride (DOTMA), N,N-dimethyl-2,3-dioleyloxy)propylamine (DODMA), 1,2-DiLinoleyloxy-N,N-dimethylaminopropane (DLinDMA), 1,2-Dilinolenyloxy-N,N-dimethylaminopropane (DLenDMA), 1,2-Dilinoleylcarbamoyloxy-3-dimethylaminopropane (DLin-C-DAP), 1,2-Dilinoleyoxy-3-(dimethylamino)acetoxypropane (Dlin-DAC), 1,2-Dilinoleyoxy-3-morpholinopropane (DLin-MA), 1,2-Dilinoleoyl-3-dimethylaminopropane (DLinDaP), 1,2-Dilinoleylthio-3-dimethylaminopropane (DLin-S-DMA), 1-linoleoyl-2-linoleyloxy-3-dimethylaminopropane (DLin-2-DMAP), 1,2-Dilinoleyloxy-3-trimethylaminopropane chloride salt (DLin-TMA.Cl), 1,2-Dilinoleoyl-3-trimethylaminopropane chloride salt (DLin-TAP.Cl), 1,2-Dilinoleyloxy-3-(N-methylpiperazino)propane (DLin-MPz), or 3-(N,N-Dilinoleylamino)-1,2-propanediol (DLinAP), 3-(N,N-Dioleylamino)-1,2-propanedio (DOAP), 1,2-Dilinoleyloxo-3-(2-N,N-dimethylamino)ethoxypropane (DLin-EG-DMA), 1,2-Dilinolenyloxy-N,N-dimethylaminopropane (DLinDMA), 2,2-Dilinoleyl-4-dimethylaminomethyl-[1,3]-dioxolane (DLin-K-DMA) or analogs thereof, (3aR,5s,6aS)-N,N-dimethyl-2,2-di((9Z,12Z)-octadeca-9,12-dienyl)tetrahydro-3aH-cyclopenta[d][1,3]dioxol-5-amine (ALN100), (6Z,9Z,28Z,31Z)-heptatriaconta-6,9,28,31-tetraen-19-yl 4-(dimethylamino)butanoate (MC3), 1,1′-(2-(4-(2-((2-(bis(2-hydroxydodecyl)amino)ethyl)(2-hydroxydodecyl)amino)ethyl)piperazin-1-yl)ethylazanediyl)didodecan-2-ol (Tech GI), or a mixture thereof. The cationic lipid can comprise from about 20 mol % to about 50 mol % or about 40 mol % of the total lipid present in the particle.

[0563] In another embodiment, the compound 2,2-Dilinoleyl-4-dimethylaminoethyl-[1,3]-dioxolane can be used to prepare lipid-siRNA nanoparticles. Synthesis of 2,2-Dilinoleyl-4-dimethylaminoethyl-[1,3]-dioxolane is described in U.S. provisional patent application No. 61/107,998 filed on Oct. 23, 2008, which is herein incorporated by reference.

[0564] In one embodiment, the lipid-siRNA particle includes 40% 2, 2-Dilinoleyl-4-dimethylaminoethyl-[1,3]-dioxolane: 10% DSPC: 40% Cholesterol: 10% PEG-C-DOMG (mole percent) with a particle size of 63.0±20 nm and a 0.027 siRNA/Lipid Ratio.

[0565] The ionizable/non-cationic lipid can be an anionic lipid or a neutral lipid including, but not limited to, distearoylphosphatidylcholine (DSPC), dioleoylphosphatidylcholine (DOPC), dipalmitoylphosphatidylcholine (DPPC), dioleoylphosphatidylglycerol (DOPG), dipalmitoylphosphatidylglycerol (DPPG), dioleoyl-phosphatidylethanolamine (DOPE), palmitoyloleoylphosphatidylcholine (POPC), palmitoyloleoylphosphatidylethanolamine (POPE), dioleoyl-phosphatidylethanolamine 4-(N-maleimidomethyl)-cyclohexane-1-carboxylate (DOPE-mal), dipalmitoyl phosphatidyl ethanolamine (DPPE), dimyristoylphosphoethanolamine (DMPE), distearoyl-phosphatidyl-ethanolamine (DSPE), 16-O-monomethyl PE, 16-O-dimethyl PE, 18-1-trans PE, 1-stearoyl-2-oleoyl-phosphatidyethanolamine (SOPE), cholesterol, or a mixture thereof. The non-cationic lipid can be from about 5 mol % to about 90 mol %, about 10 mol %, or about 58 mol % if cholesterol is included, of the total lipid present in the particle.

[0566] The conjugated lipid that inhibits aggregation of particles can be, for example, a polyethyleneglycol (PEG)-lipid including, without limitation, a PEG-diacylglycerol (DAG), a PEG-dialkyloxypropyl (DAA), a PEG-phospholipid, a PEG-ceramide (Cer), or a mixture thereof. The PEG-DAA conjugate can be, for example, a PEG-dilauryloxypropyl (Ci₂), a PEG-dimyristyloxypropyl (Ci₄), a PEG-dipalmityloxypropyl (Ci₆), or a PEG-distearyloxypropyl (C]₈). The conjugated lipid that prevents aggregation of particles can be from 0 mol % to about 20 mol % or about 2 mol % of the total lipid present in the particle.

[0567] In some embodiments, the nucleic acid-lipid particle further includes cholesterol at, e.g., about 10 mol % to about 60 mol % or about 48 mol % of the total lipid present in the particle.

[0568] In one embodiment, the lipidoid ND98-4HCl (MW 1487) (see U.S. patent application Ser. No. 12/056,230, filed Mar. 26, 2008, which is incorporated herein by reference), Cholesterol (Sigma-Aldrich), and PEG-Ceramide C16 (Avanti Polar Lipids) can be used to prepare lipid-dsRNA nanoparticles (i.e., LNPO1 particles). Stock solutions of each in ethanol can be prepared as follows: ND98, 133 mg/ml; Cholesterol, 25 mg/ml, PEG-Ceramide C16, 100 mg/ml. The ND98, Cholesterol, and PEG-Ceramide C16 stock solutions can then be combined in a, e.g., 42:48:10 molar ratio. The combined lipid solution can be mixed with aqueous dsRNA (e.g., in sodium acetate pH 5) such that the final ethanol concentration is about 35-45% and the final sodium acetate concentration is about 100-300 mM. Lipid-dsRNA nanoparticles typically form spontaneously upon mixing. Depending on the desired particle size distribution, the resultant nanoparticle mixture can be extruded through a polycarbonate membrane (e.g., 100 nm cut-off) using, for example, a thermobarrel extruder, such as Lipex Extruder (Northern Lipids, Inc). In some cases, the extrusion step can be omitted. Ethanol removal and simultaneous buffer exchange can be accomplished by, for example, dialysis or tangential flow filtration. Buffer can be exchanged with, for example, phosphate buffered saline (PBS) at about pH 7, e.g., about pH 6.9, about pH 7.0, about pH 7.1, about pH 7.2, about pH 7.3, or about pH 7.4.

[chemical structure]

[0569] LNPO1 formulations are described, e.g., in International Application Publication No. WO 2008/042973, which is hereby incorporated by reference.

[0570] Additional exemplary lipid-dsRNA formulations are described in Table 1.

TABLE 1

| | | cationic lipid/non-cationic |
|---|---|---|
| | | lipid/cholesterol/PEG-lipid conjugate |
| | Ionizable/Cationic Lipid | Lipid:siRNA ratio |
| SNALP-1 | 1,2-Dilinolenyloxy-N,N- | DLinDMA/DPPC/Cholesterol/PEG-cDMA |
| | dimethylaminopropane (DLinDMA) | (57.1/7.1/34.4/1.4) |
| | | lipid:siRNA ~7:1 |
| 2-XTC | 2,2-Dilinoleyl-4-dimethylaminoethyl-[1,3]- | XTC/DPPC/Cholesterol/PEG-cDMA |
| | dioxolane (XTC) | 57.1/7.1/34.4/1.4 |
| | | lipid:siRNA ~7:1 |
| LNP05 | 2,2-Dilinoleyl-4-dimethylaminoethyl-[1,3]- | XTC/DSPC/Cholesterol/PEG-DMG |
| | dioxolane (XTC) | 57.5/7.5/31.5/3.5 |
| | | lipid:siRNA ~6:1 |
| LNP06 | 2,2-Dilinoleyl-4-dimethylaminoethyl-[1,3]- | XTC/DSPC/Cholesterol/PEG-DMG |
| | dioxolane (XTC) | 57.5/7.5/31.5/3.5 |
| | | lipid:siRNA ~11:1 |
| LNP07 | 2,2-Dilinoleyl-4-dimethylaminoethyl-[1,3]- | XTC/DSPC/Cholesterol/PEG-DMG |
| | dioxolane (XTC) | 60/7.5/31/1.5, |
| | | lipid:siRNA ~6:1 |
| LNP08 | 2,2-Dilinoleyl-4-dimethylaminoethyl-[1,3]- | XTC/DSPC/Cholesterol/PEG-DMG |
| | dioxolane (XTC) | 60/7.5/31/1.5, |
| | | lipid:siRNA ~11:1 |
| LNP09 | 2,2-Dilinoleyl-4-dimethylaminoethyl-[1,3]- | XTC/DSPC/Cholesterol/PEG-DMG |
| | dioxolane (XTC) | 50/10/38.5/1.5 |
| | | Lipid:siRNA 10:1 |
| LNP10 | (3aR,5s,6aS)-N,N-dimethyl-2,2- | ALN100/DSPC/Cholesterol/PEG-DMG |
| | di((9Z,12Z)-octadeca-9,12- | 50/10/38.5/1.5 |
| | dienyl)tetrahydro-3aH- | Lipid:siRNA 10:1 |
| | cyclopenta[d][1,3]dioxol-5-amine | |
| | (ALN100) | |
| LNP11 | (6Z,9Z,28Z,31Z)-heptatriaconta-6,9,28,31- | MC-3/DSPC/Cholesterol/PEG-DMG |
| | tetraen-19-yl 4-(dimethylamino)butanoate | 50/10/38.5/1.5 |
| | (MC3) | Lipid:siRNA 10:1 |
| LNP12 | 1,1′-(2-(4-(2-((2-(bis(2- | Tech G1/DSPC/Cholesterol/PEG-DMG |
| | hydroxydodecyl)amino)ethyl)(2- | 50/10/38.5/1.5 |
| | hydroxydodecyl)amino)ethyl)piperazin-1- | Lipid:siRNA 10:1 |
| | yl)ethylazanediyl)didodecan-2-ol (Tech | |
| | G1) | |
| LNP13 | XTC | XTC/DSPC/Chol/PEG-DMG |
| | | 50/10/38.5/1.5 |
| | | Lipid:siRNA: 33:1 |
| LNP14 | MC3 | MC3/DSPC/Chol/PEG-DMG |
| | | 40/15/40/5 |
| | | Lipid:siRNA: 11:1 |
| LNP15 | MC3 | MC3/DSPC/Chol/PEG-DSG/GalNAc-PEG- |
| | | DSG |
| | | 50/10/35/4.5/0.5 |
| | | Lipid:siRNA: 11:1 |
| LNP16 | MC3 | MC3/DSPC/Chol/PEG-DMG |
| | | 50/10/38.5/1.5 |
| | | Lipid:siRNA: 7:1 |
| LNP17 | MC3 | MC3/DSPC/Chol/PEG-DSG |
| | | 50/10/38.5/1.5 |
| | | Lipid:siRNA: 10:1 |
| LNP18 | MC3 | MC3/DSPC/Chol/PEG-DMG |
| | | 50/10/38.5/1.5 |
| | | Lipid:siRNA: 12:1 |
| LNP19 | MC3 | MC3/DSPC/Chol/PEG-DMG |
| | | 50/10/35/5 |
| | | Lipid:siRNA: 8:1 |
| LNP20 | MC3 | MC3/DSPC7Chol/PEG-DPG |
| | | 50/10/38.5/1.5 |
| | | Lipid:siRNA: 10:1 |
| LNP21 | C12-200 | C12-200/DSPC/Chol/PEG-DSG |
| | | 50/10/38.5/1.5 |
| | | Lipid:siRNA: 7:1 |
| LNP22 | XTC | XTC/DSPC/Chol/PEG-DSG |
| | | 50/10/38.5/1.5 |
| | | Lipid:siRNA: 10:1 |

DSPC: distearoylphosphatidylcholine
DPPC: dipalmitoylphosphatidylcholine
PEG-DMG: PEG-didimyristoyl glycerol (C14-PEG, or PEG-C14) (PEG with avg mol wt of 2000)
PEG-DSG: PEG-distyryl glycerol (C18-PEG, or PEG-C18) (PEG with avg mol wt of 2000)
PEG-cDMA: PEG-carbamoyl-1,2-dimyristyloxypropylamine (PEG with avg mol wt of 2000)

SNALP (1,2-Dilinolenyloxy-N,N-dimethylaminopropane (DLinDMA)) comprising formulations are described in International Publication No. WO2009/127060, filed Apr. 15, 2009, which is hereby incorporated by reference.

[0571] XTC comprising formulations are described, e.g., in U.S. Provisional Ser. No. 61/148,366, filed Jan. 29, 2009; U.S. Provisional Ser. No. 61/156,851, filed Mar. 2, 2009; U.S. Provisional Serial No. filed Jun. 10, 2009; U.S. Provisional Ser. No. 61/228,373, filed Jul. 24, 2009; U.S. Provisional Ser. No. 61/239,686, filed Sep. 3, 2009, and International Application No. PCT/US2010/022614, filed Jan. 29, 2010, which are hereby incorporated by reference.

[0572] MC3 comprising formulations are described, e.g., in U.S. Publication No. 2010/0324120, filed Jun. 10, 2010, the entire contents of which are hereby incorporated by reference.

[0573] ALNY-100 comprising formulations are described, e.g., International patent application number PCT/US09/63933, filed on Nov. 10, 2009, which is hereby incorporated by reference.

[0574] C12-200 comprising formulations are described in U.S. Provisional Ser. No. 61/175,770, filed May 5, 2009 and International Application No. PCT/US10/33777, filed May 5, 2010, which are hereby incorporated by reference.

[0575] Compositions and formulations for oral administration include powders or granules, microparticulates, nanoparticulates, suspensions or solutions in water or non-aqueous media, capsules, gel capsules, sachets, tablets or minitablets. Thickeners, flavoring agents, diluents, emulsifiers, dispersing aids or binders can be desirable. In some embodiments, oral formulations are those in which dsRNAs featured in the invention are administered in conjunction with one or more penetration enhancer surfactants and chelators. Suitable surfactants include fatty acids and/or esters or salts thereof, bile acids and/or salts thereof. Suitable bile acids/salts include chenodeoxycholic acid (CDCA) and ursodeoxychenodeoxycholic acid (UDCA), cholic acid, dehydrocholic acid, deoxycholic acid, glucholic acid, glycholic acid, glycodeoxycholic acid, taurocholic acid, taurodeoxycholic acid, sodium tauro-24, 25-dihydro-fusidate and sodium glycodihydrofusidate. Suitable fatty acids include arachidonic acid, undecanoic acid, oleic acid, lauric acid, caprylic acid, capric acid, myristic acid, palmitic acid, stearic acid, linoleic acid, linolenic acid, dicaprate, tricaprate, monoolein, dilaurin, glyceryl 1-monocaprate, 1-dodecylazacycloheptan-2-one, an acylcarnitine, an acylcholine, or a monoglyceride, a diglyceride or a pharmaceutically acceptable salt thereof (e.g., sodium). In some embodiments, combinations of penetration enhancers are used, for example, fatty acids/salts in combination with bile acids/salts. One exemplary combination is the sodium salt of lauric acid, capric acid and UDCA. Further penetration enhancers include polyoxyethylene-9-lauryl ether, polyoxyethylene-20-cetyl ether. DsRNAs featured in the invention can be delivered orally, in granular form including sprayed dried particles, or complexed to form micro or nanoparticles. DsRNA complexing agents include poly-amino acids; polyimines; polyacrylates; polyalkylacrylates, polyoxethanes, polyalkylcyanoacrylates; cationized gelatins, albumins, starches, acrylates, polyethyleneglycols (PEG) and starches; polyalkylcyanoacrylates; DEAE-derivatized polyimines, pollulans, celluloses and starches. Suitable complexing agents include chitosan, N-trimethylchitosan, poly-L-lysine, polyhistidine, polyornithine, polyspermines, protamine, polyvinylpyridine, polythiodiethylaminomethylethylene P(TDAE), polyaminostyrene (e.g., p-amino), poly(methylcyanoacrylate), poly(ethylcyanoacrylate), poly(butylcyanoacrylate), poly(isobutylcyanoacrylate), poly(isohexylcynaoacrylate), DEAE-methacrylate, DEAE-hexylacrylate, DEAE-acrylamide, DEAE-albumin and DEAE-dextran, polymethylacrylate, polyhexylacrylate, poly(D,L-lactic acid), poly(DL-lactic-co-glycolic acid (PLGA), alginate, and polyethyleneglycol (PEG). Oral formulations for dsRNAs and their preparation are described in detail in U.S. Pat. No. 6,887,906, US Publn. No. 20030027780, and U.S. Pat. No. 6,747,014, each of which is incorporated herein by reference.

[0576] Compositions and formulations for parenteral, intraparenchymal (into the brain), intrathecal, intraventricular or intrahepatic administration can include sterile aqueous solutions which can also contain buffers, diluents and other suitable additives such as, but not limited to, penetration enhancers, carrier compounds and other pharmaceutically acceptable carriers or excipients.

[0577] Pharmaceutical compositions of the present invention include, but are not limited to, solutions, emulsions, and liposome-containing formulations. These compositions can be generated from a variety of components that include, but are not limited to, preformed liquids, self-emulsifying solids and self-emulsifying semisolids. Particularly preferred are formulations that target the liver when treating hepatic disorders such as hepatic carcinoma.

[0578] The pharmaceutical formulations of the present invention, which can conveniently be presented in unit dosage form, can be prepared according to conventional techniques well known in the pharmaceutical industry. Such techniques include the step of bringing into association the active ingredients with the pharmaceutical carrier(s) or excipient(s). In general, the formulations are prepared by uniformly and intimately bringing into association the active ingredients with liquid carriers or finely divided solid carriers or both, and then, if necessary, shaping the product.

[0579] The compositions of the present invention can be formulated into any of many possible dosage forms such as, but not limited to, tablets, capsules, gel capsules, liquid syrups, soft gels, suppositories, and enemas. The compositions of the present invention can also be formulated as suspensions in aqueous, non-aqueous or mixed media. Aqueous suspensions can further contain substances which increase the viscosity of the suspension including, for example, sodium carboxymethylcellulose, sorbitol and/or dextran. The suspension can also contain stabilizers.

### C. Additional Formulations

[0580] i. Emulsions

[0581] The compositions of the present invention can be prepared and formulated as emulsions. Emulsions are typically heterogeneous systems of one liquid dispersed in another in the form of droplets usually exceeding 0.1 μm in diameter (see e.g., Ansel's Pharmaceutical Dosage Forms and Drug Delivery Systems, Allen, LV., Popovich NG., and Ansel HC., 2004, Lippincott Williams & Wilkins (8th ed.), New York, NY; Idson, in Pharmaceutical Dosage Forms, Lieberman, Rieger and Banker (Eds.), 1988, Marcel Dekker, Inc., New York, N.Y., volume 1, p. 199; Rosoff, in Pharmaceutical Dosage Forms, Lieberman, Rieger and Banker (Eds.), 1988, Marcel Dekker, Inc., New York, N.Y., Volume 1, p. 245; Block in Pharmaceutical Dosage Forms, Lieberman, Rieger and Banker (Eds.), 1988, Marcel Dekker, Inc., New York, N.Y., volume 2, p. 335; Higuchi et al., in Remington's Pharmaceutical Sciences, Mack Publishing Co., Easton, Pa., 1985, p. 301). Emulsions are often biphasic systems comprising two immiscible liquid phases intimately mixed and dispersed with each other. In general, emulsions can be of either the water-in-oil (w/o) or the oil-in-water (o/w) variety. When an aqueous phase is finely divided into and dispersed as minute droplets into a bulk oily phase, the resulting composition is called a water-in-oil (w/o) emulsion. Alternatively, when an oily phase is finely divided into and dispersed as minute droplets into a bulk aqueous phase, the resulting composition is called an oil-in-water (o/w) emulsion. Emulsions can contain additional components in addition to the dispersed phases, and the active drug which can be present as a solution in either the aqueous phase, oily phase or itself as a separate phase. Pharmaceutical excipients such as emulsifiers, stabilizers, dyes, and anti-oxidants can also be present in emulsions as needed. Pharmaceutical emulsions can also be multiple emulsions that are comprised of more than two phases such as, for example, in the case of oil-in-water-in-oil (o/w/o) and water-in-oil-in-water (w/o/w) emulsions. Such complex formulations often provide certain advantages that simple binary emulsions do not. Multiple emulsions in which individual oil droplets of an o/w emulsion enclose small water droplets constitute a w/o/w emulsion. Likewise a system of oil droplets enclosed in globules of water stabilized in an oily continuous phase provides an o/w/o emulsion.

[0582] Emulsions are characterized by little or no thermodynamic stability. Often, the dispersed or discontinuous phase of the emulsion is well dispersed into the external or continuous phase and maintained in this form through the means of emulsifiers or the viscosity of the formulation. Either of the phases of the emulsion can be a semisolid or a solid, as is the case of emulsion-style ointment bases and creams. Other means of stabilizing emulsions entail the use of emulsifiers that can be incorporated into either phase of the emulsion. Emulsifiers can broadly be classified into four categories: synthetic surfactants, naturally occurring emulsifiers, absorption bases, and finely dispersed solids (see e.g., Ansel's Pharmaceutical Dosage Forms and Drug Delivery Systems, Allen, LV., Popovich NG., and Ansel HC., 2004, Lippincott Williams & Wilkins (8th ed.), New York, NY; Idson, in Pharmaceutical Dosage Forms, Lieberman, Rieger and Banker (Eds.), 1988, Marcel Dekker, Inc., New York, N.Y., volume 1, p. 199).

[0583] Synthetic surfactants, also known as surface active agents, have found wide applicability in the formulation of emulsions and have been reviewed in the literature (see e.g., Ansel's Pharmaceutical Dosage Forms and Drug Delivery Systems, Allen, LV., Popovich NG., and Ansel HC., 2004, Lippincott Williams & Wilkins (8th ed.), New York, NY; Rieger, in Pharmaceutical Dosage Forms, Lieberman, Rieger and Banker (Eds.), 1988, Marcel Dekker, Inc., New York, N.Y., volume 1, p. 285; Idson, in Pharmaceutical Dosage Forms, Lieberman, Rieger and Banker (Eds.), Marcel Dekker, Inc., New York, N.Y., 1988, volume 1, p. 199). Surfactants are typically amphiphilic and comprise a hydrophilic and a hydrophobic portion. The ratio of the hydrophilic to the hydrophobic nature of the surfactant has been termed the hydrophile/lipophile balance (HLB) and is a valuable tool in categorizing and selecting surfactants in the preparation of formulations. Surfactants can be classified into different classes based on the nature of the hydrophilic group: nonionic, anionic, cationic and amphoteric (see e.g., Ansel's Pharmaceutical Dosage Forms and Drug Delivery Systems, Allen, LV., Popovich NG., and Ansel HC., 2004, Lippincott Williams & Wilkins (8th ed.), New York, NY Rieger, in Pharmaceutical Dosage Forms, Lieberman, Rieger and Banker (Eds.), 1988, Marcel Dekker, Inc., New York, N.Y., volume 1, p. 285).

[0584] Naturally occurring emulsifiers used in emulsion formulations include lanolin, beeswax, phosphatides, lecithin and acacia. Absorption bases possess hydrophilic properties such that they can soak up water to form w/o emulsions yet retain their semisolid consistencies, such as anhydrous lanolin and hydrophilic petrolatum. Finely divided solids have also been used as good emulsifiers especially in combination with surfactants and in viscous preparations. These include polar inorganic solids, such as heavy metal hydroxides, nonswelling clays such as bentonite, attapulgite, hectorite, kaolin, montmorillonite, colloidal aluminum silicate and colloidal magnesium aluminum silicate, pigments and nonpolar solids such as carbon or glyceryl tristearate.

[0585] A large variety of non-emulsifying materials are also included in emulsion formulations and contribute to the properties of emulsions. These include fats, oils, waxes, fatty acids, fatty alcohols, fatty esters, humectants, hydrophilic colloids, preservatives and antioxidants (Block, in Pharmaceutical Dosage Forms, Lieberman, Rieger and Banker (Eds.), 1988, Marcel Dekker, Inc., New York, N.Y., volume 1, p. 335; Idson, in Pharmaceutical Dosage Forms, Lieberman, Rieger and Banker (Eds.), 1988, Marcel Dekker, Inc., New York, N.Y., volume 1, p. 199).

[0586] Hydrophilic colloids or hydrocolloids include naturally occurring gums and synthetic polymers such as polysaccharides (for example, acacia, agar, alginic acid, carrageenan, guar gum, karaya gum, and tragacanth), cellulose derivatives (for example, carboxymethylcellulose and carboxypropylcellulose), and synthetic polymers (for example, carbomers, cellulose ethers, and carboxyvinyl polymers). These disperse or swell in water to form colloidal solutions that stabilize emulsions by forming strong interfacial films around the dispersed-phase droplets and by increasing the viscosity of the external phase.

[0587] Since emulsions often contain a number of ingredients such as carbohydrates, proteins, sterols and phosphatides that can readily support the growth of microbes, these formulations often incorporate preservatives. Commonly used preservatives included in emulsion formulations include methyl paraben, propyl paraben, quaternary ammonium salts, benzalkonium chloride, esters of p-hydroxybenzoic acid, and boric acid. Antioxidants are also commonly added to emulsion formulations to prevent deterioration of the formulation. Antioxidants used can be free radical scavengers such as tocopherols, alkyl gallates, butylated hydroxyanisole, butylated hydroxytoluene, or reducing agents such as ascorbic acid and sodium metabisulfite, and antioxidant synergists such as citric acid, tartaric acid, and lecithin.

[0588] The application of emulsion formulations via dermatological, oral and parenteral routes and methods for their manufacture have been reviewed in the literature (see e.g., Ansel's Pharmaceutical Dosage Forms and Drug Delivery Systems, Allen, LV., Popovich NG., and Ansel HC., 2004, Lippincott Williams & Wilkins (8th ed.), New York, NY; Idson, in Pharmaceutical Dosage Forms, Lieberman, Rieger and Banker (Eds.), 1988, Marcel Dekker, Inc., New York, N.Y., volume 1, p. 199). Emulsion formulations for oral delivery have been very widely used because of ease of formulation, as well as efficacy from an absorption and bioavailability standpoint (see e.g., Ansel's Pharmaceutical Dosage Forms and Drug Delivery Systems, Allen, LV., Popovich NG., and Ansel HC., 2004, Lippincott Williams & Wilkins (8th ed.), New York, NY; Rosoff, in Pharmaceutical Dosage Forms, Lieberman, Rieger and Banker (Eds.), 1988, Marcel Dekker, Inc., New York, N.Y., volume 1, p. 245; Idson, in Pharmaceutical Dosage Forms, Lieberman, Rieger and Banker (Eds.), 1988, Marcel Dekker, Inc., New York, N.Y., volume 1, p. 199). Mineral-oil base laxatives, oil-soluble vitamins and high fat nutritive preparations are among the materials that have commonly been administered orally as o/w emulsions.

ii. Microemulsions

[0589] In one embodiment of the present invention, the compositions of iRNAs and nucleic acids are formulated as microemulsions. A microemulsion can be defined as a system of water, oil and amphiphile which is a single optically isotropic and thermodynamically stable liquid solution (see e.g., Ansel's Pharmaceutical Dosage Forms and Drug Delivery Systems, Allen, LV., Popovich NG., and Ansel HC., 2004, Lippincott Williams & Wilkins (8th ed.), New York, NY; Rosoff, in Pharmaceutical Dosage Forms, Lieberman, Rieger and Banker (Eds.), 1988, Marcel Dekker, Inc., New York, N.Y., volume 1, p. 245). Typically microemulsions are systems that are prepared by first dispersing an oil in an aqueous surfactant solution and then adding a sufficient amount of a fourth component, generally an intermediate chain-length alcohol to form a transparent system. Therefore, microemulsions have also been described as thermodynamically stable, isotropically clear dispersions of two immiscible liquids that are stabilized by interfacial films of surface-active molecules (Leung and Shah, in: Controlled Release of Drugs: Polymers and Aggregate Systems, Rosoff, M., Ed., 1989, VCH Publishers, New York, pages 185-215). Microemulsions commonly are prepared via a combination of three to five components that include oil, water, surfactant, cosurfactant and electrolyte. Whether the microemulsion is of the water-in-oil (w/o) or an oil-in-water (o/w) type is dependent on the properties of the oil and surfactant used and on the structure and geometric packing of the polar heads and hydrocarbon tails of the surfactant molecules (Schott, in Remington's Pharmaceutical Sciences, Mack Publishing Co., Easton, Pa., 1985, p. 271).

[0590] The phenomenological approach utilizing phase diagrams has been extensively studied and has yielded a comprehensive knowledge, to one skilled in the art, of how to formulate microemulsions (see e.g., Ansel's Pharmaceutical Dosage Forms and Drug Delivery Systems, Allen, LV., Popovich NG., and Ansel HC., 2004, Lippincott Williams & Wilkins (8th ed.), New York, NY; Rosoff, in Pharmaceutical Dosage Forms, Lieberman, Rieger and Banker (Eds.), 1988, Marcel Dekker, Inc., New York, N.Y., volume 1, p. 245; Block, in Pharmaceutical Dosage Forms, Lieberman, Rieger and Banker (Eds.), 1988, Marcel Dekker, Inc., New York, N.Y., volume 1, p. 335). Compared to conventional emulsions, microemulsions offer the advantage of solubilizing water-insoluble drugs in a formulation of thermodynamically stable droplets that are formed spontaneously.

[0591] Surfactants used in the preparation of microemulsions include, but are not limited to, ionic surfactants, non-ionic surfactants, Brij 96, polyoxyethylene oleyl ethers, polyglycerol fatty acid esters, tetraglycerol monolaurate (ML310), tetraglycerol monooleate (M0310), hexaglycerol monooleate (PO310), hexaglycerol pentaoleate (PO500), decaglycerol monocaprate (MCA750), decaglycerol monooleate (M0750), decaglycerol sequioleate (S0750), decaglycerol decaoleate (DA0750), alone or in combination with cosurfactants. The cosurfactant, usually a short-chain alcohol such as ethanol, 1-propanol, and 1-butanol, serves to increase the interfacial fluidity by penetrating into the surfactant film and consequently creating a disordered film because of the void space generated among surfactant molecules. Microemulsions can, however, be prepared without the use of cosurfactants and alcohol-free self-emulsifying microemulsion systems are known in the art. The aqueous phase can typically be, but is not limited to, water, an aqueous solution of the drug, glycerol, PEG300, PEG400, polyglycerols, propylene glycols, and derivatives of ethylene glycol. The oil phase can include, but is not limited to, materials such as Captex 300, Captex 355, Capmul MCM, fatty acid esters, medium chain (C8-C12) mono, di, and tri-glycerides, polyoxyethylated glyceryl fatty acid esters, fatty alcohols, polyglycolized glycerides, saturated polyglycolized C8-C10 glycerides, vegetable oils and silicone oil.

[0592] Microemulsions are particularly of interest from the standpoint of drug solubilization and the enhanced absorption of drugs. Lipid based microemulsions (both o/w and w/o) have been proposed to enhance the oral bioavailability of drugs, including peptides (see e.g., U.S. Pat. Nos. 6,191,105; 7,063,860; 7,070,802; 7,157,099; Constantinides et al., Pharmaceutical Research, 1994, 11, 1385-1390; Ritschel, Meth. Find. Exp. Clin. Pharmacol., 1993, 13, 205). Microemulsions afford advantages of improved drug solubilization, protection of drug from enzymatic hydrolysis, possible enhancement of drug absorption due to surfactant-induced alterations in membrane fluidity and permeability, ease of preparation, ease of oral administration over solid dosage forms, improved clinical potency, and decreased toxicity (see e.g., U.S. Pat. Nos. 6,191,105; 7,063,860; 7,070,802; 7,157,099; Constantinides et al., Pharmaceutical Research, 1994, 11, 1385; Ho et al., J. Pharm. Sci., 1996, 85, 138-143). Often microemulsions can form spontaneously when their components are brought together at ambient temperature. This can be particularly advantageous when formulating thermolabile drugs, peptides or iRNAs. Microemulsions have also been effective in the transdermal delivery of active components in both cosmetic and pharmaceutical applications. It is expected that the microemulsion compositions and formulations of the present invention will facilitate the increased systemic absorption of iRNAs and nucleic acids from the gastrointestinal tract, as well as improve the local cellular uptake of iRNAs and nucleic acids.

[0593] Microemulsions of the present invention can also contain additional components and additives such as sorbitan monostearate (Grill 3), Labrasol, and penetration enhancers to improve the properties of the formulation and to enhance the absorption of the iRNAs and nucleic acids of the present invention. Penetration enhancers used in the microemulsions of the present invention can be classified as belonging to one of five broad categories-surfactants, fatty acids, bile salts, chelating agents, and non-chelating non-surfactants (Lee et al., Critical Reviews in Therapeutic Drug Carrier Systems, 1991, p. 92). Each of these classes has been discussed above.

iii. Microparticles

[0594] An iRNA agent of the invention may be incorporated into a particle, e.g., a microparticle. Microparticles can be produced by spray-drying, but may also be produced by other methods including lyophilization, evaporation, fluid bed drying, vacuum drying, or a combination of these techniques.

iv. Penetration Enhancers

[0595] In one embodiment, the present invention employs various penetration enhancers to effect the efficient delivery of nucleic acids, particularly iRNAs, to the skin of animals. Most drugs are present in solution in both ionized and nonionized forms. However, usually only lipid soluble or lipophilic drugs readily cross cell membranes. It has been discovered that even non-lipophilic drugs can cross cell membranes if the membrane to be crossed is treated with a penetration enhancer. In addition to aiding the diffusion of non-lipophilic drugs across cell membranes, penetration enhancers also enhance the permeability of lipophilic drugs.

[0596] Penetration enhancers can be classified as belonging to one of five broad categories, i.e., surfactants, fatty acids, bile salts, chelating agents, and non-chelating non-surfactants (see e.g., Malmsten, M. Surfactants and polymers in drug delivery, Informa Health Care, New York, NY, 2002; Lee et al., Critical Reviews in Therapeutic Drug Carrier Systems, 1991, p.92). Each of the above mentioned classes of penetration enhancers are described below in greater detail.

[0597] Surfactants (or “surface-active agents”) are chemical entities which, when dissolved in an aqueous solution, reduce the surface tension of the solution or the interfacial tension between the aqueous solution and another liquid, with the result that absorption of iRNAs through the mucosa is enhanced. In addition to bile salts and fatty acids, these penetration enhancers include, for example, sodium lauryl sulfate, polyoxyethylene-9-lauryl ether and polyoxyethylene-20-cetyl ether) (see e.g., Malmsten, M. Surfactants and polymers in drug delivery, Informa Health Care, New York, NY, 2002; Lee et al., Critical Reviews in Therapeutic Drug Carrier Systems, 1991, p.92); and perfluorochemical emulsions, such as FC-43. Takahashi et al., J. Pharm. Pharmacol., 1988, 40, 252).

[0598] Various fatty acids and their derivatives which act as penetration enhancers include, for example, oleic acid, lauric acid, capric acid (n-decanoic acid), myristic acid, palmitic acid, stearic acid, linoleic acid, linolenic acid, dicaprate, tricaprate, monoolein (1-monooleoyl-rac-glycerol), dilaurin, caprylic acid, arachidonic acid, glycerol 1-monocaprate, 1-dodecylazacycloheptan-2-one, acylcarnitines, acylcholines, C1-20 alkyl esters thereof (e.g., methyl, isopropyl and t-butyl), and mono- and di-glycerides thereof (i.e., oleate, laurate, caprate, myristate, palmitate, stearate, linoleate, etc.) (see e.g., Touitou, E., et al. Enhancement in Drug Delivery, CRC Press, Danvers, M A, 2006; Lee et al., Critical Reviews in Therapeutic Drug Carrier Systems, 1991, p.92; Muranishi, Critical Reviews in Therapeutic Drug Carrier Systems, 1990, 7, 1-33; El Hariri et al., J. Pharm. Pharmacol., 1992, 44, 651-654).

[0599] The physiological role of bile includes the facilitation of dispersion and absorption of lipids and fat-soluble vitamins (see e.g., Malmsten, M. Surfactants and polymers in drug delivery, Informa Health Care, New York, NY, 2002; Brunton, Chapter 38 in: Goodman & Gilman's The Pharmacological Basis of Therapeutics, 9th Ed., Hardman et al. Eds., McGraw-Hill, New York, 1996, pp. 934-935). Various natural bile salts, and their synthetic derivatives, act as penetration enhancers. Thus the term “bile salts” includes any of the naturally occurring components of bile as well as any of their synthetic derivatives. Suitable bile salts include, for example, cholic acid (or its pharmaceutically acceptable sodium salt, sodium cholate), dehydrocholic acid (sodium dehydrocholate), deoxycholic acid (sodium deoxycholate), glucholic acid (sodium glucholate), glycholic acid (sodium glycocholate), glycodeoxycholic acid (sodium glycodeoxycholate), taurocholic acid (sodium taurocholate), taurodeoxycholic acid (sodium taurodeoxycholate), chenodeoxycholic acid (sodium chenodeoxycholate), ursodeoxycholic acid (UDCA), sodium tauro-24, 25-dihydro-fusidate (STDHF), sodium glycodihydrofusidate and polyoxyethylene-9-lauryl ether (POE) (see e.g., Malmsten, M. Surfactants and polymers in drug delivery, Informa Health Care, New York, NY, 2002; Lee et al., Critical Reviews in Therapeutic Drug Carrier Systems, 1991, page 92; Swinyard, Chapter 39 In: Remington's Pharmaceutical Sciences, 18th Ed., Gennaro, ed., Mack Publishing Co., Easton, Pa., 1990, pages 782-783; Muranishi, Critical Reviews in Therapeutic Drug Carrier Systems, 1990, 7, 1-33; Yamamoto et al., J. Pharm. Exp. Ther., 1992, 263, 25; Yamashita et al., J. Pharm. Sci., 1990, 79, 579-583).

[0600] Chelating agents, as used in connection with the present invention, can be defined as compounds that remove metallic ions from solution by forming complexes therewith, with the result that absorption of iRNAs through the mucosa is enhanced. With regards to their use as penetration enhancers in the present invention, chelating agents have the added advantage of also serving as DNase inhibitors, as most characterized DNA nucleases require a divalent metal ion for catalysis and are thus inhibited by chelating agents (Jarrett, J. Chromatogr., 1993, 618, 315-339). Suitable chelating agents include but are not limited to disodium ethylenediaminetetraacetate (EDTA), citric acid, salicylates (e.g., sodium salicylate, 5-methoxysalicylate and homovanilate), N-acyl derivatives of collagen, laureth-9 and N-amino acyl derivatives of beta-diketones (enamines)(see e.g., Katdare, A. et al., Excipient development for pharmaceutical, biotechnology, and drug delivery, CRC Press, Danvers, M A, 2006; Lee et al., Critical Reviews in Therapeutic Drug Carrier Systems, 1991, page 92; Muranishi, Critical Reviews in Therapeutic Drug Carrier Systems, 1990, 7, 1-33; Buur et al., J. Control Rel., 1990, 14, 43-51).

[0601] As used herein, non-chelating non-surfactant penetration enhancing compounds can be defined as compounds that demonstrate insignificant activity as chelating agents or as surfactants but that nonetheless enhance absorption of iRNAs through the alimentary mucosa (see e.g., Muranishi, Critical Reviews in Therapeutic Drug Carrier Systems, 1990, 7, 1-33). This class of penetration enhancers includes, for example, unsaturated cyclic ureas, 1-alkyl- and 1-alkenylazacyclo-alkanone derivatives (Lee et al., Critical Reviews in Therapeutic Drug Carrier Systems, 1991, page 92); and non-steroidal anti-inflammatory agents such as diclofenac sodium, indomethacin and phenylbutazone (Yamashita et al., J. Pharm. Pharmacol., 1987, 39, 621-626).

[0602] Agents that enhance uptake of iRNAs at the cellular level can also be added to the pharmaceutical and other compositions of the present invention. For example, cationic lipids, such as lipofectin (Junichi et al, U.S. Pat. No. 5,705,188), cationic glycerol derivatives, and polycationic molecules, such as polylysine (Lollo et al., PCT Application WO 97/30731), are also known to enhance the cellular uptake of dsRNAs. Examples of commercially available transfection reagents include, for example Lipofectamine™ (Invitrogen; Carlsbad, CA), Lipofectamine 2000™ (Invitrogen; Carlsbad, CA), 293fectin™ (Invitrogen; Carlsbad, CA), Cellfectin™ (Invitrogen; Carlsbad, CA), DMRIE-C™ (Invitrogen; Carlsbad, CA), FreeStyle™ MAX (Invitrogen; Carlsbad, CA), Lipofectamine™ 2000 CD (Invitrogen; Carlsbad, CA), Lipofectamine™ (Invitrogen; Carlsbad, CA), iRNAMAX (Invitrogen; Carlsbad, CA), Oligofectamine™ (Invitrogen; Carlsbad, CA), Optifect™ (Invitrogen; Carlsbad, CA), X-tremeGENE Q2 Transfection Reagent (Roche; Grenzacherstrasse, Switzerland), DOTAP Liposomal Transfection Reagent (Grenzacherstrasse, Switzerland), DOSPER Liposomal Transfection Reagent (Grenzacherstrasse, Switzerland), or Fugene (Grenzacherstrasse, Switzerland), Transfectam® Reagent (Promega; Madison, WI), TransFast™ Transfection Reagent (Promega; Madison, WI), Tfx™-20 Reagent (Promega; Madison, WI), Tfx™-50 Reagent (Promega; Madison, WI), DreamFect™ (OZ Biosciences; Marseille, France), EcoTransfect (OZ Biosciences; Marseille, France), TransPass^{a} D1 Transfection Reagent (New England Biolabs; Ipswich, MA, USA), LyoVec™/LipoGen™ (Invitrogen; San Diego, CA, USA), PerFectin Transfection Reagent (Genlantis; San Diego, CA, USA), NeuroPORTER Transfection Reagent (Genlantis; San Diego, CA, USA), GenePORTER Transfection reagent (Genlantis; San Diego, CA, USA), GenePORTER 2 Transfection reagent (Genlantis; San Diego, CA, USA), Cytofectin Transfection Reagent (Genlantis; San Diego, CA, USA), BaculoPORTER Transfection Reagent (Genlantis; San Diego, CA, USA), TroganPORTER™ transfection Reagent (Genlantis; San Diego, CA, USA), RiboFect (Bioline; Taunton, MA, USA), PlasFect (Bioline; Taunton, MA, USA), UniFECTOR (B-Bridge International; Mountain View, CA, USA), SureFECTOR (B-Bridge International; Mountain View, CA, USA), or HiFect™ (B-Bridge International, Mountain View, CA, USA), among others.

[0603] Other agents can be utilized to enhance the penetration of the administered nucleic acids, including glycols such as ethylene glycol and propylene glycol, pyrrols such as 2-pyrrol, azones, and terpenes such as limonene and menthone.

v. Carriers

[0604] Certain compositions of the present invention also incorporate carrier compounds in the formulation. As used herein, “carrier compound” or “carrier” can refer to a nucleic acid, or analog thereof, which is inert (i.e., does not possess biological activity per se) but is recognized as a nucleic acid by in vivo processes that reduce the bioavailability of a nucleic acid having biological activity by, for example, degrading the biologically active nucleic acid or promoting its removal from circulation. The coadministration of a nucleic acid and a carrier compound, typically with an excess of the latter substance, can result in a substantial reduction of the amount of nucleic acid recovered in the liver, kidney or other extracirculatory reservoirs, presumably due to competition between the carrier compound and the nucleic acid for a common receptor. For example, the recovery of a partially phosphorothioate dsRNA in hepatic tissue can be reduced when it is coadministered with polyinosinic acid, dextran sulfate, polycytidic acid or 4-acetamido-4′isothiocyano-stilbene-2,2′-disulfonic acid (Miyao et al., DsRNA Res. Dev., 1995, 5, 115-121; Takakura et al., DsRNA & Nucl. Acid Drug Dev., 1996, 6, 177-183.

vi. Excipients

[0605] In contrast to a carrier compound, a “pharmaceutical carrier” or “excipient” is a pharmaceutically acceptable solvent, suspending agent or any other pharmacologically inert vehicle for delivering one or more nucleic acids to an animal. The excipient can be liquid or solid and is selected, with the planned manner of administration in mind, so as to provide for the desired bulk, consistency, etc., when combined with a nucleic acid and the other components of a given pharmaceutical composition. Typical pharmaceutical carriers include, but are not limited to, binding agents (e.g., pregelatinized maize starch, polyvinylpyrrolidone or hydroxypropyl methylcellulose, etc.); fillers (e.g., lactose and other sugars, microcrystalline cellulose, pectin, gelatin, calcium sulfate, ethyl cellulose, polyacrylates or calcium hydrogen phosphate, etc.); lubricants (e.g., magnesium stearate, talc, silica, colloidal silicon dioxide, stearic acid, metallic stearates, hydrogenated vegetable oils, corn starch, polyethylene glycols, sodium benzoate, sodium acetate, etc.); disintegrants (e.g., starch, sodium starch glycolate, etc.); and wetting agents (e.g., sodium lauryl sulphate, etc).

[0606] Pharmaceutically acceptable organic or inorganic excipients suitable for non-parenteral administration which do not deleteriously react with nucleic acids can also be used to formulate the compositions of the present invention. Suitable pharmaceutically acceptable carriers include, but are not limited to, water, salt solutions, alcohols, polyethylene glycols, gelatin, lactose, amylose, magnesium stearate, talc, silicic acid, viscous paraffin, hydroxymethylcellulose, polyvinylpyrrolidone and the like.

[0607] Formulations for topical administration of nucleic acids can include sterile and non-sterile aqueous solutions, non-aqueous solutions in common solvents such as alcohols, or solutions of the nucleic acids in liquid or solid oil bases. The solutions can also contain buffers, diluents and other suitable additives. Pharmaceutically acceptable organic or inorganic excipients suitable for non-parenteral administration which do not deleteriously react with nucleic acids can be used.

[0608] Suitable pharmaceutically acceptable excipients include, but are not limited to, water, salt solutions, alcohol, polyethylene glycols, gelatin, lactose, amylose, magnesium stearate, talc, silicic acid, viscous paraffin, hydroxymethylcellulose, polyvinylpyrrolidone and the like.

vii. Other Components

[0609] The compositions of the present invention can additionally contain other adjunct components conventionally found in pharmaceutical compositions, at their art-established usage levels. Thus, for example, the compositions can contain additional, compatible, pharmaceutically-active materials such as, for example, antipruritics, astringents, local anesthetics or anti-inflammatory agents, or can contain additional materials useful in physically formulating various dosage forms of the compositions of the present invention, such as dyes, flavoring agents, preservatives, antioxidants, opacifiers, thickening agents and stabilizers. However, such materials, when added, should not unduly interfere with the biological activities of the components of the compositions of the present invention. The formulations can be sterilized and, if desired, mixed with auxiliary agents, e.g., lubricants, preservatives, stabilizers, wetting agents, emulsifiers, salts for influencing osmotic pressure, buffers, colorings, flavorings and/or aromatic substances and the like which do not deleteriously interact with the nucleic acid(s) of the formulation.

[0610] Aqueous suspensions can contain substances which increase the viscosity of the suspension including, for example, sodium carboxymethylcellulose, sorbitol and/or dextran. The suspension can also contain stabilizers.

[0611] In some embodiments, pharmaceutical compositions featured in the invention include (a) one or more iRNA compounds and (b) one or more agents which function by a non-iRNA mechanism and which are useful in treating a hemolytic disorder. Examples of such agents include, but are not lmited to an anti-inflammatory agent, anti-steatosis agent, anti-viral, and/or anti-fibrosis agent.

[0612] In addition, other substances commonly used to protect the liver, such as silymarin, can also be used in conjunction with the iRNAs described herein. Other agents useful for treating liver diseases include telbivudine, entecavir, and protease inhibitors such as telaprevir and other disclosed, for example, in Tung et al., U.S. Application Publication Nos. 2005/0148548, 2004/0167116, and 2003/0144217; and in Hale et al., U.S. Application Publication No. 2004/0127488.

[0613] Toxicity and therapeutic efficacy of such compounds can be determined by standard pharmaceutical procedures in cell cultures or experimental animals, e.g., for determining the LD50 (the dose lethal to 50% of the population) and the ED50 (the dose therapeutically effective in 50% of the population). The dose ratio between toxic and therapeutic effects is the therapeutic index and it can be expressed as the ratio LD50/ED50. Compounds that exhibit high therapeutic indices are preferred.

[0614] The data obtained from cell culture assays and animal studies can be used in formulating a range of dosage for use in humans. The dosage of compositions featured herein in the invention lies generally within a range of circulating concentrations that include the ED50 with little or no toxicity. The dosage can vary within this range depending upon the dosage form employed and the route of administration utilized. For any compound used in the methods featured in the invention, the therapeutically effective dose can be estimated initially from cell culture assays. A dose can be formulated in animal models to achieve a circulating plasma concentration range of the compound or, when appropriate, of the polypeptide product of a target sequence (e.g., achieving a decreased concentration of the polypeptide) that includes the IC50 (i.e., the concentration of the test compound which achieves a half-maximal inhibition of symptoms) as determined in cell culture. Such information can be used to more accurately determine useful doses in humans. Levels in plasma can be measured, for example, by high performance liquid chromatography.

[0615] In addition to their administration, as discussed above, the iRNAs featured in the invention can be administered in combination with other known agents effective in treatment of pathological processes mediated by contact activation pathway gene expression (i.e., F12 gene expression). In any event, the administering physician can adjust the amount and timing of iRNA administration on the basis of results observed using standard measures of efficacy known in the art or described herein.

[0616] This invention is further illustrated by the following examples which should not be construed as limiting. The entire contents of all references, patents and published patent applications cited throughout this application, as well as the Figures and the Sequence Listing, are hereby incorporated herein by reference.

### EXAMPLES

### Example 1. F12 iRNA Synthesis

### Source of Reagents

[0617] Where the source of a reagent is not specifically given herein, such reagent can be obtained from any supplier of reagents for molecular biology at a quality/purity standard for application in molecular biology.

### Transcripts

[0618] siRNA Design

[0619] A set of siRNAs targeting the human F12, “coagulation factor XII” (human: NCBI refseqID NM_000505; NCBI GeneID: 2161), as well as toxicology-species F12 orthologs (cynomolgus monkey: XM_005558647; mouse: NM_021489; rat, NM_001014006) were designed using custom R and Python scripts. The human F12 REFSEQ mRNA has a length of 2060 bases. The rationale and method for the set of siRNA designs is as follows: the predicted efficacy for every potential 19mer siRNA from position 50 through position 2060 (the coding region and 3′ UTR) of human F12 mRNA (containing the the coding region and 3′ UTR) was determined using a linear model that predicted the direct measure of mRNA knockdown based on the data of more than 20,000 distinct siRNA designs targeting a large number of vertebrate genes. Subsets of the F12 siRNAs were designed with perfect or near-perfect matches between human, cynomolgus and rhesus monkey. A further subset was designed with perfect or near-perfect matches to mouse and rat F12 orthologs. For each strand of the siRNA, a custom Python script was used in a brute force search to measure the number and positions of mismatches between the siRNA and all potential alignments in the target species transcriptome. Extra weight was given to mismatches in the seed region, defined here as positions 2-9 of the antisense oligonucleotide, as well the cleavage site of the siRNA, defined here as positions 10-11 of the antisense oligonucleotide. The relative weights for the mismatches were 2.8 for seed mismatches, 1.2 for cleavage site mismatches, and 1 mismatches in other positions up through antisense position 19. Mismatches in the first position were ignored. A specificity score was calculated for each strand by summing the value of each weighted mismatch. Preference was given to siRNAs whose antisense score in human and cynomolgus monkey was >=3.0 and predicted efficacy was >=70% knockdown of the F12 transcript.

[0620] A detailed list of the unmodified F12 sense and antisense strand sequences is shown in Table 3. A detailed list of the modified F12 sense and antisense strand sequences is shown in Table 4.

siRNA Synthesis

[0621] F12 siRNA sequences were synthesized at 1 μmol scale on a Mermade 192 synthesizer (BioAutomation) using the solid support mediated phosphoramidite chemistry. The solid support was controlled pore glass (500 A) loaded with custom GalNAc ligand or universal solid support (AM biochemical). Ancillary synthesis reagents, 2′-F and 2′—O-Methyl RNA and deoxy phosphoramidites were obtained from Thermo-Fisher (Milwaukee, WI) and Hongene (China). 2′F 2′—O-Methyl, GNA (glycol nucleic acids), 5′phosphate and other modifications were introduced using the corresponding phosphoramidites. Synthesis of 3′ GalNAc conjugated single strands was performed on a GalNAc modified CPG support. Custom CPG universal solid support was used for the synthesis of antisense single strands. Coupling time for all phosphoramidites (100 mM in acetonitrile) was 5 min employing 5-Ethylthio-1H-tetrazole (ETT) as activator (0.6 M in acetonitrile). Phosphorothioate linkages were generated using a 50 mM solution of 3-((Dimethylamino-methylidene) amino)-3H-1,2,4-dithiazole-3-thione (DDTT, obtained from Chemgenes (Wilmington, MA, USA)) in anhydrous acetonitrile/pyridine (1:1 v/v). Oxidation time was 3 minutes. All sequences were synthesized with final removal of the DMT group (“DMT off”).

[0622] Upon completion of the solid phase synthesis, oligoribonucleotides were cleaved from the solid support and deprotected in sealed 96 deep well plates using 200 μL Aqueous Methylamine reagents at 60° C. for 20 minutes. For sequences containing 2′ ribo residues (2′—OH) that are protected with a tert-butyl dimethyl silyl (TBDMS) group, a second step deprotection was performed using TEA.3HF (triethylamine trihydro fluoride) reagent. To the methylamine deprotection solution, 200 uL of dimethyl sulfoxide (DMSO) and 300 ul TEA. 3HF reagent was added and the solution was incubated for additional 20 min at 60° C. At the end of cleavage and deprotection step, the synthesis plate was allowed to come to room temperature and was precipitated by addition of L of acetontile: ethanol mixture (9:1). The plates were cooled at −80 C for 2 hrs, superanatant decanted carefully with the aid of a multi channel pipette. The oligonucleotide pellet was re-suspended in 20 mM NaOAc buffer and were desalted using a 5 mL HiTrap size exclusion column (GE Healthcare) on an AKTA Purifier System equipped with an A905 autosampler and a Frac 950 fraction collector. Desalted samples were collected in 96-well plates. Samples from each sequence were analyzed by LC-MS to confirm the identity, UV (260 nm) for quantification and a selected set of samples by IEX chromatography to determine purity.

[0623] Annealing of F12 single strands was performed on a Tecan liquid handling robot. Equimolar mixture of sense and antisense single strands were combined and annealed in 96 well plates. After combining the complementary single strands, the 96-well plate was sealed tightly and heated in an oven at 100° C. for 10 minutes and allowed to come slowly to room temperature over a period 2-3 hours. The concentration of each duplex was normalized to 10 μM in X PBS and then submitted for in vitro screening assays.

TABLE 2
Abbreviations of nucleotide monomers used in nucleic
acid sequence representation. It will be understood
that these monomers, when present in an oligonucleotide,
are mutually linked by 5′-3′-phosphodiester bonds.

| Abbreviation | Nucleotide(s) |
|---|---|
| A | Adenosine-3′-phosphate |
| Af | 2′-fluoroadenosine-3′-phosphate |
| Afs | 2′-fluoroadenosine-3′-phosphorothioate |
| As | adenosine-3′-phosphorothioate |
| C | cytidine-3′-phosphate |
| Cf | 2′-fluorocytidine-3′-phosphate |
| Cfs | 2′-fluorocytidine-3′-phosphorothioate |
| Cs | cytidine-3′-phosphorothioate |
| G | guanosine-3′-phosphate |
| Gf | 2′-fluoroguanosine-3′-phosphate |
| Gfs | 2′-fluoroguanosine-3′-phosphorothioate |
| Gs | guanosine-3′-phosphorothioate |
| T | 5′-methyluridine-3′-phosphate |
| Tf | 2′-fluoro-5-methyluridine-3′-phosphate |
| Tfs | 2′-fluoro-5-methyluridine-3′-phosphorothioate |
| Ts | 5-methyluridine-3′-phosphorothioate |
| U | Uridine-3′-phosphate |
| Uf | 2′-fluorouridine-3′-phosphate |
| Ufs | 2′-fluorouridine-3′-phosphorothioate |
| Us | uridine-3′-phosphorothioate |
| N | any nucleotide (G, A, C, T or U) |
| a | 2′-O-methyladenosine-3′-phosphate |
| as | 2′-O-methyladenosine-3′-phosphorothioate |
| c | 2′-O-methylcytidine-3′-phosphate |
| cs | 2′-O-methylcytidine-3′-phosphorothioate |
| g | 2′-O-methylguanosine-3′-phosphate |
| gs | 2′-O-methylguanosine-3′-phosphorothioate |
| t | 2′-O-methyl-5-methyluridine-3′-phosphate |
| ts | 2′-O-methyl-5-methyluridine-3′-phosphorothioate |
| u | 2′-O-methyluridine-3′-phosphate |
| us | 2′-O-methyluridine-3′-phosphorothioate |
| s | phosphorothioate linkage |
| L96 | N-[tris(GalNAc-alkyl)-amidodecanoyl)]-4-hydroxyprolinol |
| | Hyp-(GalNAc-alkyl)3 |
| (dt) | deoxy-thymine |
| Y34 | 2-hydroxymethyl-tetrahydrofurane-4-methoxy-3-phosphate |
| | (abasic 2′-OMe furanose) |
| Y44 | 2-hydroxymethyl-tetrahydrofurane-5-phosphate |
| (Agn) | Adenosine-glycol nucleic acid (GNA) |
| (Tgn) | Thymidine-glycol nucleic acid (GNA) S-Isomer |
| (Cgn) | Cytidine-glycol nucleic acid (GNA) |
| P | Phosphate |
| VP | Vinyl-phosphate |

TABLE 3
Unmodified F12 Sequences

| | sense | | SEQ | antis | | Position | SEQ |
|---|---|---|---|---|---|---|---|
| Duplex | oligo | Sense Sequence | ID | oligo | Antisense Sequence | in | ID |
| name | name | 5′ to 3′ | NO: | name | 5′ to 3′ | NM_000505 | NO: |
| AD-66186 | A-132464 | GGUGAGCUUGGAGUCAACACU | 378 | A-132465 | AGUGUUGACUCCAAGCUCACCAG | 79_102 | 428 |
| AD-66157 | A-132406 | GAGCUUGGAGUCAACACUUUA | 379 | A-132407 | UAAAGUGUUGACUCCAAGCUCAC | 82_105 | 429 |
| AD-66118 | A-132326 | CUUGGAGUCAACACUUUCGAU | 380 | A-132327 | AUCGAAAGUGUUGACUCCAAGCU | 85_108 | 430 |
| AD-66115 | A-132320 | UUGGAGUCAACACUUUCGAUU | 381 | A-132321 | AAUCGAAAGUGUUGACUCCAAGC | 86_109 | 431 |
| AD-66170 | A-132432 | AACACUUUCGAUUCCACCUUA | 382 | A-132433 | UAAGGUGGAAUCGAAAGUGUUGA | 94_117 | 432 |
| AD-66166 | A-132424 | AGGAGCAUAAGUACAAAGCUA | 383 | A-132425 | UAGCUUUGUACUUAUGCUCCUUG | 126_149 | 433 |
| AD-66173 | A-132438 | GAGCAUAAGUACAAAGCUGAA | 384 | A-132439 | UUCAGCUUUGUACUUAUGCUCCU | 128_151 | 434 |
| AD-66177 | A-132446 | UAAGUACAAAGCUGAAGAGCA | 385 | A-132447 | UGCUCUUCAGCUUUGUACUUAUG | 133_156 | 435 |
| AD-66161 | A-132414 | AAGUACAAAGCUGAAGAGCAA | 386 | A-132415 | UUGCUCUUCAGCUUUGUACUUAU | 134_157 | 436 |
| AD-66114 | A-132318 | UACCACAAAUGUACCCACAAA | 387 | A-132319 | UUUGUGGGUACAUUUGUGGUACA | 218_241 | 437 |
| AD-66179 | A-132450 | CCACAAAUGUACCCACAAGGA | 388 | A-132451 | UCCUUGUGGGUACAUUUGUGGUA | 220_243 | 438 |
| AD-66160 | A-132412 | UACUGUUUGGAGCCCAAGAAA | 389 | A-132413 | UUUCUUGGGCUCCAAACAGUAUC | 305_328 | 439 |
| AD-66171 | A-132434 | ACUGUUUGGAGCCCAAGAAAA | 390 | A-132435 | UUUUCUUGGGCUCCAAACAGUAU | 306_329 | 440 |
| AD-66189 | A-132470 | CUGUUUGGAGCCCAAGAAAGU | 391 | A-132471 | ACUUUCUUGGGCUCCAAACAGUA | 307_330 | 441 |
| AD-66122 | A-132334 | GGAGCCCAAGAAAGUGAAAGA | 392 | A-132335 | UCUUUCACUUUCUUGGGCUCCAA | 313_336 | 442 |
| AD-66176 | A-132444 | GAGCCCAAGAAAGUGAAAGAA | 393 | A-132445 | UUCUUUCACUUUCUUGGGCUCCA | 314_337 | 443 |
| AD-66125 | A-132340 | AGCCCAAGAAAGUGAAAGACA | 394 | A-132341 | UGUCUUUCACUUUCUUGGGCUCC | 315_338 | 444 |
| AD-66112 | A-132314 | GCCCAAGAAAGUGAAAGACCA | 395 | A-132315 | UGGUCUUUCACUUUCUUGGGCUC | 316_339 | 445 |
| AD-66172 | A-132436 | CCCAAGAAAGUGAAAGACCAA | 396 | A-132437 | UUGGUCUUUCACUUUCUUGGGCU | 317_340 | 446 |
| AD-66127 | A-132344 | CAAGAAAGUGAAAGACCAUUA | 397 | A-132345 | UAAUGGUCUUUCACUUUCUUGGG | 319_342 | 447 |
| AD-66162 | A-132416 | GAAAGUGAAAGACCACUGCAA | 398 | A-132417 | UUGCAGUGGUCUUUCACUUUCUU | 322_345 | 448 |
| AD-66181 | A-132454 | AAAGUGAAAGACCACUGCAGA | 399 | A-132455 | UCUGCAGUGGUCUUUCACUUUCU | 323_346 | 449 |
| AD-66184 | A-132460 | UCACUGGAAACCACUGCCAGA | 400 | A-132461 | UCUGGCAGUGGUUUCCAGUGAGG | 420_443 | 450 |
| AD-66182 | A-132456 | ACUGCCAGAAAGAGAAGUGCU | 401 | A-132457 | AGCACUUCUCUUUCUGGCAGUGG | 432_455 | 451 |
| AD-66167 | A-132426 | CUGCCAGAAAGAGAAGUGCUU | 402 | A-132427 | AAGCACUUCUCUUUCUGGCAGUG | 433_456 | 452 |
| AD-66165 | A-132422 | CAGAAAGAGAAGUGCUUUGAA | 403 | A-132423 | UUCAAAGCACUUCUCUUUCUGGC | 437_460 | 453 |
| AD-66155 | A-132402 | AGAAAGAGAAGUGCUUUGAGA | 404 | A-132403 | UCUCAAAGCACUUCUCUUUCUGG | 438_461 | 454 |
| AD-66159 | A-132410 | AGUGCUUUGAGCCUCAGCUUA | 405 | A-132411 | UAAGCUGAGGCUCAAAGCACUUC | 447_470 | 455 |
| AD-66168 | A-132428 | UUCCACAAGAAUGAGAUAUGA | 406 | A-132429 | UCAUAUCUCAUUCUUGUGGAAAA | 476_499 | 456 |
| AD-66185 | A-132462 | UCCACAAGAAUGAGAUAUGGU | 407 | A-132463 | ACCAUAUCUCAUUCUUGUGGAAA | 477_500 | 457 |
| AD-66156 | A-132404 | CCACAAGAAUGAGAUAUGGUA | 408 | A-132405 | UACCAUAUCUCAUUCUUGUGGAA | 478_501 | 458 |
| AD-66113 | A-132316 | AAGAAUGAGAUAUGGUAUAGA | 409 | A-132317 | UCUAUACCAUAUCUCAUUCUUGU | 482_505 | 459 |
| AD-66188 | A-132468 | UGGUAUAGAACUGAGCAAGCA | 410 | A-132469 | UGCUUGCUCAGUUCUAUACCAUA | 494_517 | 460 |
| AD-66190 | A-132472 | GUAUAGAACUGAGCAAGCAGA | 411 | A-132473 | UCUGCUUGCUCAGUUCUAUACCA | 496_519 | 461 |
| AD-66180 | A-132452 | AUAGAACUGAGCAAGCAGCUA | 412 | A-132453 | UAGCUGCUUGCUCAGUUCUAUAC | 498_521 | 462 |
| AD-66117 | A-132324 | CCAGAUGCCAGUGCAAGGGUA | 413 | A-132325 | UACCCUUGCACUGGCAUCUGGCC | 522_545 | 463 |
| AD-66169 | A-132430 | GCCAGUGCAAGGGUCCUGAUA | 414 | A-132431 | UAUCAGGACCCUUGCACUGGCAU | 528_551 | 464 |
| AD-66174 | A-132440 | CAGUGCAAGGGUCCUGAUGCA | 415 | A-132441 | UGCAUCAGGACCCUUGCACUGGC | 530_553 | 465 |
| AD-66175 | A-132442 | ACCAAGGCAAGCUGCUAUGAU | 416 | A-132443 | AUCAUAGCAGCUUGCCUUGGUGU | 683_706 | 466 |
| AD-66158 | A-132408 | CCAAGGCAAGCUGCUAUGAUA | 417 | A-132409 | UAUCAUAGCAGCUUGCCUUGGUG | 684_707 | 467 |
| AD-66119 | A-132328 | AGGCUUCAUGUCCCACUCAUA | 418 | A-132329 | UAUGAGUGGGACAUGAAGCCUAG | 974_997 | 468 |
| AD-66187 | A-132466 | GGCUCCGCAAGAGUCUGUCUU | 419 | A-132467 | AAGACAGACUCUUGCGGAGCCGC | 1131_1154 | 469 |
| AD-66163 | A-132418 | GCUCCGCAAGAGUCUGUCUUA | 420 | A-132419 | UAAGACAGACUCUUGCGGAGCCG | 1132_1155 | 470 |
| AD-66116 | A-132322 | CCGCAAGAGUCUGUCUUCGAU | 421 | A-132323 | AUCGAAGACAGACUCUUGCGGAG | 1135_1158 | 471 |
| AD-66137 | A-132364 | GUUCGAGGGGGCUGAAGAAUA | 422 | A-132365 | UAUUCUUCAGCCCCCUCGAACUG | 1570_1593 | 472 |
| AD-66183 | A-132458 | GGAAGGCAAGAUUGUGUCCCA | 423 | A-132459 | UGGGACACAAUCUUGCCUUCCAU | 1956_1979 | 473 |
| AD-66164 | A-132420 | AGGCAAGAUUGUGUCCCAUUA | 424 | A-132421 | UAAUGGGACACAAUCUUGCCUUC | 1959_1982 | 474 |
| AD-66121 | A-132332 | AACUCAAUAAAGUGCUUUGAA | 425 | A-132333 | UUCAAAGCACUUUAUUGAGUUUC | 2017_2040 | 475 |
| AD-66126 | A-132342 | AAUAAAGUGCUUUGAAAACGU | 426 | A-132343 | ACGUUUUCAAAGCACUUUAUUGA | 2022_2045 | 476 |
| AD-66178 | A-132448 | AGUGCUUUGAAAAUGCUGAGA | 427 | A-132449 | UCUCAGCAUUUUCAAAGCACUUU | 2027_2050 | 477 |

TABLE 4
Modified F12 Sequences

| | sense | | SEQ | antis | | SEQ |
|---|---|---|---|---|---|---|
| Duplex | oligo | | ID | oligo | | ID |
| name | name | Sense Sequence 5′ to 3′ | NO: | name | Antisense Sequence 5′ to 3′ | NO: |
| AD-66186 | A-132464 | GfsgsUfgAfgCfuUfGfGfaGf | 478 | A-132465 | asGfsuGfuUfgAfcUfccaAfgCfuC | 528 |
| | | uCfaAfcAfcUfL96 | | | faCfcsasg | |
| AD-66157 | A-132406 | GfsasGfcUfuGfgAfGfUfcAf | 479 | A-132407 | usAfsaAfgUfgUfuGfacuCfcAfaG | 529 |
| | | aCfaCfuUfuML96 | | | fcUfcsasc | |
| AD-66118 | A-132326 | CfsusUfgGfaGfuCfAfAfcAf | 480 | A-132327 | asUfscGfaAfaGfuGfuugAfcUfcC | 530 |
| | | cUfuUfcGfaUfL96 | | | faAfgscsu | |
| AD-66115 | A-132320 | UfsusGfgAfgUfcAfAfCfaCf | 481 | A-132321 | asAfsuCfgAfaAfgUfguuGfaCfuC | 531 |
| | | uUfuCfgAfuUfL96 | | | fcAfasgsc | |
| AD-66170 | A-132432 | AfsasCfaCfuUfuCfGfAfuUf | 482 | A-132433 | usAfsaGfgUfgGfaAfucgAfaAfgU | 532 |
| | | cCfaCfcUfuAfL96 | | | fgUfusgsa | |
| AD-66166 | A-132424 | AfsgsGfaGfcAfuAfAfGfuAf | 483 | A-132425 | usAfsgCfuUfuGfuAfcuuAfuGfcU | 533 |
| | | cAfaAfgCfuAfL96 | | | fcCfususg | |
| AD-66173 | A-132438 | GfsasGfcAfuAfaGfUfAfcAf | 484 | A-132439 | usUfscAfgCfuUfuGfuacUfuAfuG | 534 |
| | | aAfgCfuGfaAfL96 | | | fcUfcscsu | |
| AD-66177 | A-132446 | UfsasAfgUfaCfaAfAfGfcUf | 485 | A-132447 | usGfscUfcUfuCfaGfcuuUfgUfaC | 535 |
| | | gAfaGfaGfcAfL96 | | | fuUfasusg | |
| AD-66161 | A-132414 | AfsasGfuAfcAfaAfGfCfuGf | 486 | A-132415 | usUfsgCfuCfuUfcAfgcuUfuGfuA | 536 |
| | | aAfgAfgCfaAfL96 | | | fcUfusasu | |
| AD-66114 | A-132318 | UfsasCfcAfcAfaAfUfGfuAf | 487 | A-132319 | usUfsuGfuGfgGfuAfcauUfuGfuG | 537 |
| | | cCfcAfcAfaAfL96 | | | fgUfascsa | |
| AD-66179 | A-132450 | CfscsAfcAfaAfuGfUfAfcCf | 488 | A-132451 | usCfscUfuGfuGfgGfuacAfuUfuG | 538 |
| | | cAfcAfaGfgAfL96 | | | fuGfgsusa | |
| AD-66160 | A-132412 | UfsasCfuGfuUfuGfGfAfgCf | 489 | A-132413 | usUfsuCfuUfgGfgCfuccAfaAfcA | 539 |
| | | cCfaAfgAfaAfL96 | | | fgUfasusc | |
| AD-66171 | A-132434 | AfscsUfgUfuUfgGfAfGfcCf | 490 | A-132435 | usUfsuUfcUfuGfgGfcucCfaAfaC | 540 |
| | | cAfaGfaAfaAfL96 | | | faGfusasu | |
| AD-66189 | A-132470 | CfsusGfuUfuGfgAfGfCfcCf | 491 | A-132471 | asCfsuUfuCfuUfgGfgcuCfcAfaA | 541 |
| | | aAfgAfaAfgUfL96 | | | fcAfgsusa | |
| AD-66122 | A-132334 | GfsgsAfgCfcCfaAfGfAfaAf | 492 | A-132335 | usCfsuUfuCfaCfuUfucuUfgGfgC | 542 |
| | | gUfgAfaAfgAfL96 | | | fuCfcsasa | |
| AD-66176 | A-132444 | GfsasGfcCfcAfaGfAfAfaGf | 493 | A-132445 | usUfscUfuUfcAfcUfuucUfuGfgG | 543 |
| | | uGfaAfaGfaAfL96 | | | fcUfcscsa | |
| AD-66125 | A-132340 | AfsgsCfcCfaAfgAfAfAfgUf | 494 | A-132341 | usGfsuCfuUfuCfaCfuuuCfuUfgG | 544 |
| | | gAfaAfgAfcAfL96 | | | fgCfuscsc | |
| AD-66112 | A-132314 | GfscsCfcAfaGfaAfAfGfuGf | 495 | A-132315 | usGfsgUfcUfuUfcAfcuuUfcUfuG | 545 |
| | | aAfaGfaCfcAfL96 | | | fgGfcsusc | |
| AD-66172 | A-132436 | CfscsCfaAfgAfaAfGfUfgAf | 496 | A-132437 | usUfsgGfuCfuUfuCfacuUfuCfuU | 546 |
| | | aAfgAfcCfaAfL96 | | | fgGfgscsu | |
| AD-66127 | A-132344 | CfsasAfgAfaAfgUfGfAfaAf | 497 | A-132345 | usAfsaUfgGfuCfuUfucaCfuUfuC | 547 |
| | | gAfcCfaUfuAfL96 | | | fuUfgsgsg | |
| AD-66162 | A-132416 | GfsasAfaGfuGfaAfAfGfaCf | 498 | A-132417 | usUfsgCfaAfuGfgUfcuuUfcAfcU | 548 |
| | | cAfuUfgCfaAfL96 | | | fuUfcsusu | |
| AD-66181 | A-132454 | AfsasAfgUfgAfaAfGfAfcCf | 499 | A-132455 | usCfsuGfcAfaUfgGfucuUfuCfaC | 549 |
| | | aUfuGfcAfgAfL96 | | | fuUfuscsu | |
| AD-66184 | A-132460 | UfscsAfcUfgGfaAfAfCfcAf | 500 | A-132461 | usCfsuGfgCfaGfuGfguuUfcCfaG | 550 |
| | | cUfgCfcAfgAfL96 | | | fuGfasgsg | |
| AD-66182 | A-132456 | AfscsUfgCfcAfgAfAfAfgAf | 501 | A-132457 | asGfscAfcUfuCfuCfuuuCfuGfgC | 551 |
| | | gAfaGfuGfcUfL96 | | | faGfusgsg | |
| AD-66167 | A-132426 | CfsusGfcCfaGfaAfAfGfaGf | 502 | A-132427 | asAfsgCfaCfuUfcUfcuuUfcUfgG | 552 |
| | | aAfgUfgCfuUfL96 | | | fcAfgsusg | |
| AD-66165 | A-132422 | CfsasGfaAfaGfaGfAfAfgUf | 503 | A-132423 | usUfscAfaAfgCfaCfuucUfcUfuU | 553 |
| | | gCfuUfuGfaAfL96 | | | fcUfgsgsc | |
| AD-66155 | A-132402 | AfsgsAfaAfgAfgAfAfGfuGf | 504 | A-132403 | usCfsuCfaAfaGfcAfcuuCfuCfuU | 554 |
| | | cUfuUfgAfgAfL96 | | | fuCfusgsg | |
| AD-66159 | A-132410 | AfsgsUfgCfuUfuGfAfGfcCf | 505 | A-132411 | usAfsaGfcUfgAfgGfcucAfaAfgC | 555 |
| | | uCfaGfcUfuAfL96 | | | faCfususc | |
| AD-66168 | A-132428 | UfsusCfcAfcAfaGfAfAfuGf | 506 | A-132429 | usCfsaUfaUfcUfcAfuucUfuGfuG | 556 |
| | | aGfaUfaUfgAfL96 | | | fgAfasasa | |
| AD-66185 | A-132462 | UfscsCfaCfaAfgAfAfUfgAf | 507 | A-132463 | asCfscAfuAfuCfuCfauuCfuUfgU | 557 |
| | | gAfuAfuGfgUfL96 | | | fgGfasasa | |
| AD-66156 | A-132404 | CfscsAfcAfaGfaAfUfGfaGf | 508 | A-132405 | usAfscCfaUfaUfcUfcauUfcUfuG | 558 |
| | | aUfaUfgGfuAfL96 | | | fuGfgsasa | |
| AD-66113 | A-132316 | AfsasGfaAfuGfaGfAfUfaUf | 509 | A-132317 | usCfsuAfuAfcCfaUfaucUfcAfuU | 559 |
| | | gGfuAfuAfgAfL96 | | | fcUfusgsu | |
| AD-66188 | A-132468 | UfsgsGfuAfuAfgAfAfCfuGf | 510 | A-132469 | usGfscUfuGfcUfcAfguuCfuAfuA | 560 |
| | | aGfcAfaGfcAfL96 | | | fcCfasusa | |
| AD-66190 | A-132472 | GfsusAfuAfgAfaCfUfGfaGf | 511 | A-132473 | usCfsuGfcUfuGfcUfcagUfuCfuA | 561 |
| | | cAfaGfcAfgAfL96 | | | fuAfcscsa | |
| AD-66180 | A-132452 | AfsusAfgAfaCfuGfAfGfcAf | 512 | A-132453 | usAfsgCfuGfcUfuGfcucAfgUfuC | 562 |
| | | aGfcAfgCfuAfL96 | | | fuAfusasc | |
| AD-66117 | A-132324 | CfscsAfgAfuGfcCfAfGfuGf | 513 | A-132325 | usAfscCfcUfuGfcAfcugGfcAfuC | 563 |
| | | cAfaGfgGfuAfL96 | | | fuGfgscsc | |
| AD-66169 | A-132430 | GfscsCfaGfuGfcAfAfGfgGf | 514 | A-132431 | usAfsuCfaGfgAfcCfcuuGfcAfcU | 564 |
| | | uCfcUfgAfuAfL96 | | | fgGfcsasu | |
| AD-66174 | A-132440 | CfsasGfuGfcAfaGfGfGfuCf | 515 | A-132441 | usGfscAfuCfaGfgAfcccUfuGfcA | 565 |
| | | cUfgAfuGfcAfL96 | | | fcUfgsgsc | |
| AD-66175 | A-132442 | AfscsCfaAfgGfcAfAfGfcUf | 516 | A-132443 | asUfscAfuAfgCfaGfcuuGfcCfuU | 566 |
| | | gCfuAfuGfaUfL96 | | | fgGfusgsu | |
| AD-66158 | A-132408 | CfscsAfaGfgCfaAfGfCfuGf | 517 | A-132409 | usAfsuCfaUfaGfcAfgcuUfgCfcU | 567 |
| | | cUfaUfgAfuAfL96 | | | fuGfgsusg | |
| AD-66119 | A-132328 | AfsgsGfcUfuCfaUfGfUfcCf | 518 | A-132329 | usAfsuGfaGfuGfgGfacaUfgAfaG | 568 |
| | | cAfcUfcAfuAfL96 | | | fcCfusasg | |
| AD-66187 | A-132466 | GfsgsCfuCfcGfcAfAfGfaGf | 519 | A-132467 | asAfsgAfcAfgAfcUfcuuGfcGfgA | 569 |
| | | uCfuGfuCfuUfL96 | | | fgCfcsgsc | |
| AD-66163 | A-132418 | GfscsUfcCfgCfaAfGfAfgUf | 520 | A-132419 | usAfsaGfaCfaGfaCfucuUfgCfgG | 570 |
| | | cUfgUfcUfuAfL96 | | | faGfcscsg | |
| AD-66116 | A-132322 | CfscsGfcAfaGfaGfUfCfuGf | 521 | A-132323 | asUfscGfaAfgAfcAfgacUfcUfuG | 571 |
| | | uCfuUfcGfaUfL96 | | | fcGfgsasg | |
| AD-66137 | A-132364 | GfsusUfcGfaGfgGfGfGfcUf | 522 | A-132365 | usAfsuUfcUfuCfaGfcccCfcUfcG | 572 |
| | | gAfaGfaAfuAfL96 | | | faAfcsusg | |
| AD-66183 | A-132458 | GfsgsAfaGfgCfaAfGfAfuUf | 523 | A-132459 | usGfsgGfaCfaCfaAfucuUfgCfcU | 573 |
| | | gUfgUfcCfcAfL96 | | | fuCfcsasu | |
| AD-66164 | A-132420 | AfsgsGfcAfaGfaUfUfGfuGf | 524 | A-132421 | usAfsaUfgGfgAfcAfcaaUfcUfuG | 574 |
| | | uCfcCfaUfuAfL96 | | | fcCfususc | |
| AD-66121 | A-132332 | AfsasCfuCfaAfuAfAfAfgUf | 525 | A-132333 | usUfscAfaAfgCfaCfuuuAfuUfgA | 575 |
| | | gCfuUfuGfaAfL96 | | | fgUfususc | |
| AD-66126 | A-132342 | AfsasUfaAfaGfuGfCfUfuUf | 526 | A-132343 | asCfsgUfuUfuCfaAfagcAfcUfuU | 576 |
| | | gAfaAfaCfgUfL96 | | | faUfusgsa | |
| AD-66178 | A-132448 | AfsgsUfgCfuUfuGfAfAfaAf | 527 | A-132449 | usCfsuCfaGfcAfuUfuucAfaAfgC | 577 |
| | | uGfcUfgAfgAfL96 | | | faCfususu | |

### Example 2. In Vitro Screening of F12 siRNA Duplexes

### Cell Culture and Transfections

[0624] Hep3b or Primary Mouse Hepatocyte cells (PMH) (MSCP10, Lot #MC613) were transfected by adding 4.9 μl of Opti-MEM plus 0.1 μl of Lipofectamine RNAiMax per well (Invitrogen, Carlsbad CA. cat #13778-150) to 5 μl of siRNA duplexes per well into a 384-well plate and incubated at room temperature for 15 minutes. Forty l of DMEM (Hep3b) of William's E Medium (PMH) containing about 5×10³ cells was then added to the siRNA mixture. Cells were incubated for 24 hours prior to RNA purification.

[0625] Single dose experiments were performed at 10 nM and 0.01 nM final duplex concentration and dose response experiments were done over a range of doses from 10 nM to 36 fM final duplex concentration over 8, 6-fold dilutions.

Total RNA Isolation Using DYNABEADS mRNA Isolation Kit:

[0626] RNA was isolated using an automated protocol on a BioTek-EL406 μlatform using DYNABEADs (Invitrogen, cat #61012). Briefly, 50 μl of Lysis/Binding Buffer and 25 μl of lysis buffer containing 3 μl of magnetic beads were added to the plate with cells. Plates were incubated on an electromagnetic shaker for 10 minutes at room temperature and then magnetic beads were captured and the supernatant was removed. Bead-bound RNA was then washed 2 times with 150 μl Wash Buffer A and once with Wash Buffer B. Beads were then washed with 150 μl Elution Buffer, re-captured and the supernatant was removed.

cDNA Synthesis Using ABI High Capacity cDNA Reverse Transcription Kit (Applied Biosystems, Foster City, CA, Cat #4368813):

[0627] Ten μl of a master mix containing 1 μl 10X Buffer, 0.4 μl 25X dNTPs, 1 μl 10x Random primers, 0.5 μl Reverse Transcriptase, 0.5 μl RNase inhibitor and 6.6 μl of H2O per reaction was added to RNA isolated as described above. Plates were sealed, mixed, and incubated on an electromagnetic shaker for 10 minutes at room temperature, followed by 2 hours 37° C. Plates were then incubated at 81° C. for 8 minutes.

### Real Time PCR:

[0628] Two μl of cDNA were added to a master mix containing 0.5 μl of GAPDH TaqMan Probe (Hs99999905_m1 or 4352339E), 0.5 μl F12 probe (Hs00166821 or Mm00491349) and 5 μl Lightcycler 480 probe master mix (Roche Cat #04887301001) per well in a 384 well plates (Roche cat #04887301001). Real time PCR was performed using a LightCycler480 Real Time PCR system (Roche) using the ΔΔCt(RQ) assay. Each duplex was tested in four independent transfections.

[0629] To calculate relative fold change, real time data were analyzed using the ΔΔCt method and normalized to assays performed with cells transfected with 10 nM AD-1955, or mock transfected cells. IC₅₀s were calculated using a 4 parameter fit model using XLFit and normalized to cells transfected with AD-1955, a non-targeting control, or naïve cells.

[0630] The sense and antisense sequences ofAD-1955 are:

SENSE:
(SEQ ID NO: 2343)
cuuAcGcuGAGuAcuucGAdTsdT;
ANTISENSE:
(SEQ ID NO: 2344)
UCGAAGuACUcAGCGuAAGdTsdT.

[0631] Table 5 shows the results of a single dose screen in Hep3b cells transfected with the indicated human F12 iRNAs. Table 6 shows the results of a single dose response screen in Hep3b cells transfected with the indicated human F12 iRNAs. Table 7 shows the results of a single dose screen in primary mouse hepatocytes transfected with the indicated mouse F12 iRNAs. Table 8 shows the results of a dose response screen in primary mouse hepatocytes transfected with the indicated human F12 iRNAs. Data are expressed as percent of 8mRNA remaining relative to AD-1955.

TABLE 5
F12 Single Dose Screen in Hep3bCells

| | 10 nM | 0.1 nM | 10 nM | 0.1 nM |
|---|---|---|---|---|
| DuplexId | AVG | AVG | STDEV | STDEV |
| AD-66186 | 33.1 | 88.4 | 5.3 | 12.6 |
| AD-66157 | 62.2 | 85.3 | 9.6 | 13.2 |
| AD-66118 | 47.4 | 59.4 | 2.9 | 10.6 |
| AD-66115 | 54.8 | 73.9 | 4.8 | 3 |
| AD-66170 | 31.6 | 57.3 | 3.9 | 12.5 |
| AD-66166 | 74.7 | 88.8 | 14.3 | 15.8 |
| AD-66173 | 22.3 | 58.5 | 7.6 | 11.8 |
| AD-66177 | 52.9 | 86.7 | 6.9 | 6.3 |
| AD-66161 | 50.3 | 59.9 | 7.9 | 10 |
| AD-66114 | 42.1 | 82.3 | 5.3 | 8.5 |
| AD-66179 | 78.4 | 101.4 | 14.3 | 16.1 |
| AD-66160 | 45.4 | 82.3 | 13.4 | 18.5 |
| AD-66171 | 74.8 | 126.2 | 12.1 | 28.2 |
| AD-66189 | 49.3 | 78.1 | 16.6 | 9.1 |
| AD-66122 | 47.2 | 94.9 | 7.4 | 7.5 |
| AD-66176 | 42.7 | 69.4 | 5.2 | 7 |
| AD-66125 | 46 | 91.8 | 7.5 | 17.4 |
| AD-66112 | 60.4 | 136.8 | 11.4 | 14.4 |
| AD-66172 | 34.9 | 70.2 | 13.1 | 11.1 |
| AD-66127 | 39.5 | 73.3 | 8.5 | 12.4 |
| AD-66162 | 79.1 | 93.6 | 13 | 24.7 |
| AD-66181 | 59.8 | 101.7 | 1.2 | 5.4 |
| AD-66184 | 34 | 72.9 | 7.8 | 14.9 |
| AD-66182 | 47 | 101 | 8.8 | 7.9 |
| AD-66167 | 30.3 | 60.2 | 2.6 | 5.9 |
| AD-66165 | 44.3 | 63.2 | 11.4 | 22.3 |
| AD-66155 | 45.3 | 72.8 | 13.5 | 16.1 |
| AD-66159 | 49.6 | 98 | 8.4 | 31.2 |
| AD-66168 | 25.5 | 52.9 | 5.8 | 16.6 |
| AD-66185 | 40.8 | 81.7 | 3.8 | 11.5 |
| AD-66156 | 30.8 | 75.6 | 4.4 | 5.4 |
| AD-66113 | 42.1 | 76 | 8.1 | 5.9 |
| AD-66188 | 43.9 | 82.1 | 9.1 | 15.4 |
| AD-66190 | 40.2 | 74.9 | 9 | 8.3 |
| AD-66180 | 34.6 | 83.1 | 6.6 | 23.3 |
| AD-66117 | 48.9 | 108.1 | 4.1 | 9.5 |
| AD-66169 | 64.9 | 89.4 | 9.8 | 1.9 |
| AD-66174 | 55.4 | 107.6 | 7.9 | 23 |
| AD-66175 | 37.9 | 104.7 | 4 | 19.7 |
| AD-66158 | 55 | 107.3 | 14.7 | 31.7 |
| AD-66119 | 27.6 | 69.8 | 3.4 | 4.3 |
| AD-66187 | 53.3 | 105 | 19.6 | 9.6 |
| AD-66163 | 33.6 | 53.9 | 5.1 | 4.9 |
| AD-66116 | 33.9 | 57.4 | 10.4 | 12.6 |
| AD-66137 | 103.4 | 136.7 | 6.6 | 15.9 |
| AD-66183 | 36.5 | 91.9 | 8 | 12.7 |
| AD-66164 | 31.3 | 78.2 | 5.1 | 6.4 |
| AD-66121 | 26.5 | 72.1 | 2.7 | 18.3 |
| AD-66126 | 33.2 | 56.7 | 2.6 | 12.6 |
| AD-66178 | 51.1 | 72.1 | 6.3 | 16.5 |

TABLE 6
F12 Dose Response Screen in Hep3b Cells

| DuplexId | IC₅₀ (nM) |
|---|---|
| AD-66170 | 0.085 |
| AD-66173 | 0.244 |
| AD-66176 | N/A |
| AD-66125 | N/A |
| AD-66172 | 0.398 |
| AD-66167 | 0.457 |
| AD-66165 | 0.058 |
| AD-66168 | 0.657 |
| AD-66163 | 0.481 |
| AD-66116 | 0.089 |
| AD-66126 | 0.086 |

TABLE 7
F12 Single Dose Screen in Primary Mouse Hepatocytes

| | 10 nM | 0.1 nM | 10 nM | 0.1 nM |
|---|---|---|---|---|
| DuplexId | AVG | AVG | STDEV | STDEV |
| AD-66186 | 93.1 | 102.6 | 2 | 6.6 |
| AD-66157 | 97.4 | 114.5 | 16.5 | 17 |
| AD-66118 | 65.9 | 93 | 11.6 | 11.9 |
| AD-66115 | 61.8 | 89 | 5.5 | 8.9 |
| AD-66170 | 88 | 98.5 | 11.7 | 8.4 |
| AD-66166 | 106.8 | 98.5 | 8.8 | 5.2 |
| AD-66173 | 106.8 | 106 | 11.2 | 14.8 |
| AD-66177 | 87.5 | 103 | 3.6 | 3.2 |
| AD-66161 | 94.4 | 103.1 | 7 | 15.9 |
| AD-66114 | 38.6 | 79.1 | 4.1 | 5 |
| AD-66179 | 71.1 | 105.7 | 6.8 | 18.2 |
| AD-66160 | 14.6 | 106.8 | 1.2 | 8.7 |
| AD-66171 | 17.7 | 102.5 | 2.3 | 6.1 |
| AD-66189 | 9.1 | 90.2 | 1.3 | 6.1 |
| AD-66122 | 14.4 | 95.7 | 0.7 | 13.9 |
| AD-66176 | 10.9 | 85.8 | 2.1 | 4.6 |
| AD-66125 | 12.6 | 80.5 | 2.1 | 6.2 |
| AD-66112 | 19.1 | 82 | 7.2 | 3.5 |
| AD-66172 | 4.2 | 75.3 | 0.4 | 6.7 |
| AD-66127 | 7.4 | 48.4 | 3.7 | 7.3 |
| AD-66162 | 3.9 | 30.6 | 1.9 | 4.9 |
| AD-66181 | 7.2 | 69.2 | 0.9 | 4.1 |
| AD-66184 | 93.6 | 110.9 | 4.1 | 6.8 |
| AD-66182 | 13.4 | 89.9 | 1.3 | 2 |
| AD-66167 | 4.8 | 55.5 | 0.5 | 2.6 |
| AD-66165 | 2.1 | 18.7 | 0.3 | 3.6 |
| AD-66155 | 5.7 | 48 | 0.7 | 5.1 |
| AD-66159 | 7.2 | 88.7 | 0.5 | 3.7 |
| AD-66168 | 65.6 | 105.6 | 1.6 | 11.3 |
| AD-66185 | 96 | 108.9 | 3.1 | 16 |
| AD-66156 | 56.8 | 107.2 | 3.5 | 8.8 |
| AD-66113 | 72.8 | 88.7 | 4.8 | 5.5 |
| AD-66188 | 117.5 | 95.5 | 17.3 | 4.9 |
| AD-66190 | 118.3 | 96.5 | 5.8 | 8.4 |
| AD-66180 | 121.4 | 109.3 | 15.2 | 6.6 |
| AD-66117 | 72.3 | 89.1 | 7.4 | 8.5 |
| AD-66169 | 89.4 | 103.7 | 8.8 | 4.2 |
| AD-66174 | 92 | 103.4 | 18.1 | 8.4 |
| AD-66175 | 89.5 | 112.9 | 13.7 | 8.9 |
| AD-66158 | 103.9 | 105.3 | 11.5 | 15.2 |
| AD-66119 | 66.5 | 92 | 8.9 | 9 |
| AD-66187 | 109.1 | 107 | 16.4 | 10.3 |
| AD-66163 | 89.9 | 106 | 6.8 | 6.1 |
| AD-66116 | 69.8 | 97 | 8.2 | 10.6 |
| AD-66137 | 17.6 | 94.1 | 2.1 | 8.7 |
| AD-66183 | 100.1 | 109.6 | 7.6 | 8.4 |
| AD-66164 | 84 | 98.8 | 10.2 | 9.8 |
| AD-66121 | 2.5 | 30.5 | 0.4 | 3.2 |
| AD-66126 | 4.1 | 22.3 | 0.3 | 2.3 |
| AD-66178 | 79.6 | 112.8 | 6.8 | 16.5 |

TABLE 8
F12 Dose Response Screen in Primary Mouse Hepatocytes

| DuplexId | IC₅₀ (nM) |
|---|---|
| AD-66170 | N/A |
| AD-66173 | N/A |
| AD-66176 | 3.571 |
| AD-66125 | 14.962 |
| AD-66172 | 1.104 |
| AD-66167 | 1.013 |
| AD-66165 | 0.231 |
| AD-66168 | N/A |
| AD-66163 | N/A |
| AD-66116 | N/A |
| AD-66121 | 0.119 |
| AD-66126 | 0.045 |

### Example 3. In Vivo F12 Silencing in Wild-Type Mice

[0632] Three of the most active agents targeting F12, described above, were selected for further evaluation. In particular, additional agents targeting nucleotides 2017-2040, or nucleotides 315-338, or nucleotides 438-459 of NM_000505 (an F12 gene) were synthesized as described above. The in vivo efficacy of these additional agents was assessed by administration of a single subcutaneous dose of the agent to wild-type C57BL/6 mice and determining the level of mRNA at 7-10 days post-dose. The unmodified nucleotide sequences of the sense and antisense strands of the agents targeting F12 are provided in Table 9, and the modified nucleotide sequences of the sense and antisense strands of the agents are provided in Table 10.

[0633] In particular, wild-type C57BL/6 mice were administered either a single 1 mg/kg dose or a single 3 mg/kg dose, or a single 1 mg/kg dose or a single 10 mg/kg dose of the agent and the level of F12 mRNA was determined at 7-10 days post-dose. The results of these assays are provided in FIG. 1 demonstrate that AD-67244 was the most efficiacious agent targeting a F12 gene that was tested.

TABLE 9
Unmodified sense and antisense strand sequences of agents targeting F12

| | | | Sense | Antisense | | | | |
|---|---|---|---|---|---|---|---|---|
| | | Antisense | Position | Position | | | | |
| | | Start | in GenBank | in GenBank | | SEQ | | SEQ |
| Duplex | Tar- | Position | Reference | Reference | Sense | ID | Antisense | ID |
| Name | get | on mRNA | Sequence | Sequence | Sequence | NO | Sequence | NO |
| AD- | F12 | 2018 | NM_000505.3 | NM_000505.3_201 | AACUCAAUAAA | 890 | UUCAAAGCACUU | 898 |
| 66121 | | | _2020-2040_s | 8-2040_as | GUGCUUUGAA | | UAUUGAGUUUC | |
| AD- | F12 | 2018 | NM_000505.3 | NM_000505.3_201 | AACUCAAUAAA | 891 | UUCAAAGCACUU | 899 |
| 67244 | | | _2020-2040_s | 8-2040_as | GUGCUUUGAA | | UAUUGAGUUUC | |
| AD- | F12 | 2018 | NM_000505.3 | NM_000505.3_201 | AACUCAAUAAA | 892 | UUCAAAGCACUU | 900 |
| 67245 | | | _2020-2040_s | 8-2040_as | GUGCUUUGAA | | UAUUGAGUUUC | |
| AD- | F12 | 316 | NM_000505.3 | NM_000505.3_316- | AGCCCAAGAAA | 893 | UGUCUUUCACUU | 901 |
| 66125 | | | _318-338_s | 338_as | GUGAAAGACA | | UCUUGGGCUCC | |
| AD- | F12 | 2023 | NM_000505.3 | NM_000505.3_202 | AAUAAAGUGCU | 894 | ACGUUUUCAAAG | 902 |
| 67246 | | | _2025-2045_s | 3-2045_as | UUGAAAACGU | | CACUUUAUUGA | |
| AD- | F12 | 2023 | NM_000505.3 | NM_000505.3_202 | AAUAAAGUGCU | 895 | ACGUUUUCAAAG | 903 |
| 67247 | | | _2025-2045_s | 3-2045_as | UUGAAAACGU | | CACUUUAUUGA | |
| AD- | F12 | 438 | NM_000029.3 | NM_000029.3_438- | CAGAAAGAGAA | 896 | UUCAAAGCACUU | 904 |
| 67248 | | | _440-460_s | 460_as | GUGCUUUGAA | | CUCUUUCUGGC | |
| AD- | F12 | 438 | NM_000029.3 | NM_000029.3_438- | CAGAAAGAGAA | 897 | UUCAAAGCACUU | 905 |
| 67249 | | | _440-460_s | 460_as | GUGCUUUGAA | | CUCUUUCUGGC | |

TABLE 10
Modified sense and antisense strand sequences of agents targeting F12

| | | | Sense | Antisense | | | | |
|---|---|---|---|---|---|---|---|---|
| | | Antisense | Position | Position | | | | |
| | | Start | in GenBank | in GenBank | | SEQ | | SEQ |
| Duplex | Tar- | Position | Reference | Reference | | ID | Antisense | ID |
| Name | get | on mRNA | Sequence | Sequence | Sense Sequence | NO | Sequence | NO |
| AD- | F12 | 2018 | NM_000505.3 | NM_000505.3_ | AfsasCfuCfaAfu | 906 | usUfscAfaAf | 914 |
| 66121 | | | _2020-2040_s | 2018-2040_as | AfAfAfgUfgCfuU | | gCfaCfuuuAf | |
| | | | | | fuGfaAfL96 | | uUfgAfgUfus | |
| | | | | | | | usc | |
| AD- | F12 | 2018 | NM_000505.3 | NM_000505.3_ | asascucaAfuAfA | 907 | usUfscaaAfg | 915 |
| 67244 | | | _2020-2040_s | 2018-2040_as | fAfgugcuuugaaL | | CfAfcuuuAfu | |
| | | | | | 96 | | Ufgaguususc | |
| AD- | F12 | 2018 | NM_000505.3 | NM_000505.3_ | asascucaAfuAf | 908 | UfsUfscaaAf | 916 |
| 67245 | | | _2020-2040_s | 2018-2040_as | AfAfgugcuuuga | | gCfAfcuuuAf | |
| | | | | | aL96 | | uUfgaguusus | |
| | | | | | | | c | |
| AD- | F12 | 316 | NM_000505.3 | NM_000505.3_ | AfsgsCfcCfaAf | 909 | usGfsuCfuUfu | 917 |
| 66125 | | | _318-338_s | 316-338_as | gAfAfAfgUfgAf | | CfaCfuuuCfuU | |
| | | | | | aAfgAfc | | fgGfgCfuscsc | |
| | | | | | AfL96 | | | |
| AD- | F12 | 2023 | NM_000505.3 | NM_000505.3_ | asasuaaaGfuGf | 910 | asCfsguuUfuC | 918 |
| 67246 | | | _2025-2045_s | 2023-2045_as | CfUfuugaaaacg | | fAfaagcAfcUf | |
| | | | | | uL96 | | uuauusgsa | |
| AD- | F12 | 2023 | NM_000505.3 | NM_000505.3_ | asasuaaaGfuGf | 911 | AfsCfsguuUfu | 919 |
| 67247 | | | _2025-2045_s | 2023-2045_as | CfUfuugaaaacg | | CfAfaagcAfcU | |
| | | | | | uL96 | | fuuauusgsa | |
| AD- | F12 | 438 | NM_000029.3 | NM_000029.3_ | csasgaaaGfaGf | 912 | usUfscaaAfgC | 920 |
| 67248 | | | _440-460_s | 438-460_as | AfAfgugcuuuga | | fAfcuucUfcUf | |
| | | | | | aL96 | | uucugsgsc | |
| AD- | F12 | 438 | NM_000029.3 | NM_000029.3_ | csasgaaaGfaGf | 913 | UfsUfscaaAfg | 921 |
| 67249 | | | _440-460_s | 438-460_as | AfAfgugcuuuga | | CfAfcuucUfcU | |
| | | | | | aL96 | | fuucugsgsc | |

### Example 4. In Vivo F12 Silencing in ACE-Inhibitor Induced Vascular Permeability Mouse Model

[0634] To determine the in vivo efficacy of a single dose of a subset of the agents described above to reduce human F12 mRNA levels, wild-type C57BL/6 female mice were subcutaneously administered a single 0 mg/kg, 0.1 mg/kg 0.3 mg/kg, 1 mg/kg or 3 mg/kg dose of AD-67244 (targeting F12). At day 7 post-dose, animals were intravenously administered 2.5 mg/kg of the angiotensin-converting enzyme (ACE) inhibitor, captopril, in order to induce vascular permeability. Fifteen minutes after administration of captopril, animals were intravenously administered 30 mg/kg Evans blue dye. Fifteen minutes after Evans Blue dye administration, animals were sacrificed and blood, intestine, and liver samples were collected. Evans Blue dye was extracted and quantified from the blood and intestine samples, and target mRNA levels were determined in the liver samples.

[0635] The results of these assays using an agent targeting F12 (AD-AD-67244) are shown in FIGS. 2A-2D.

### Example 5. Synthesis and In Vitro Screening of F12 siRNA Duplexes

[0636] Additional iRNA agents targeting F12 were designed, synsthesized and screened for in vitro efficacy, as described above. A detailed list of the additional unmodified F12 sense and antisense strand sequences is shown in Table 11. A detailed list of the additional modified F12 sense and antisense strand sequences is shown in Table 12. Table 13 shows the results of a single dose screen in Hep3b cells transfected with the indicated additional F12 iRNAs. Data are expressed as percent of mRNA remaining relative to AD-1955.

TABLE 11
F12 Unmodified Sequences

| | | SEQ | | | SEQ | |
|---|---|---|---|---|---|---|
| Duplex | Sense Sequence | ID | Position in | Antisense Sequence | ID | Position in |
| Name | 5′ to 3′ | NO | NM_000505.3 | 5′ to 3′ | NO | NM_000505.3 |
| AD-70653 | GACUCCUGGAUAGGCAGCU | 946 | 12-30 | AGCUGCCUAUCCAGGAGUC | 1130 | 12-30 |
| AD-70654 | UAGGCAGCUGGACCAACGA | 947 | 22-40 | UCGUUGGUCCAGCUGCCUA | 1131 | 22-40 |
| AD-70655 | ACCAACGGACGGAUGCCAU | 948 | 33-51 | AUGGCAUCCGUCCGUUGGU | 1132 | 33-51 |
| AD-70656 | AUGCCAUGAGGGCUCUGCU | 949 | 45-63 | AGCAGAGCCCUCAUGGCAU | 1133 | 45-63 |
| AD-70657 | GCUCUGCUGCUCCUGGGGU | 950 | 56-74 | ACCCCAGGAGCAGCAGAGC | 1134 | 56-74 |
| AD-70658 | UCCUGGGGUUCCUGCUGGU | 951 | 66-84 | ACCAGCAGGAACCCCAGGA | 1135 | 66-84 |
| AD-70659 | CUGCUGGUGAGCUUGGAGU | 952 | 77-95 | ACUCCAAGCUCACCAGCAG | 1136 | 77-95 |
| AD-70660 | CUUGGAGUCAACACUUUCA | 953 | 88-106 | UGAAAGUGUUGACUCCAAG | 1137 | 88-106 |
| AD-70661 | ACUUUCGAUUCCACCUUGA | 954 | 100-118 | UCAAGGUGGAAUCGAAAGU | 1138 | 100-118 |
| AD-70662 | CCACCUUGGGAAGCCCCCA | 955 | 110-128 | UGGGGGCUUCCCAAGGUGG | 1139 | 110-128 |
| AD-70663 | GCCCCCAAGGAGCAUAAGU | 956 | 122-140 | ACUUAUGCUCCUUGGGGGC | 1140 | 122-140 |
| AD-70664 | CAUAAGUACAAAGCUGAAA | 957 | 134-152 | UUUCAGCUUUGUACUUAUG | 1141 | 134-152 |
| AD-70665 | AAGCUGAAGAGCACACAGU | 958 | 144-162 | ACUGUGUGCUCUUCAGCUU | 1142 | 144-162 |
| AD-70666 | ACACAGUCGUUCUCACUGU | 959 | 156-174 | ACAGUGAGAACGACUGUGU | 1143 | 156-174 |
| AD-70667 | UUCUCACUGUCACCGGGGA | 960 | 165-183 | UCCCCGGUGACAGUGAGAA | 1144 | 165-183 |
| AD-70668 | ACCGGGGAGCCCUGCCACU | 961 | 176-194 | AGUGGCAGGGCUCCCCGGU | 1145 | 176-194 |
| AD-70669 | UGCCACUUCCCCUUCCAGU | 962 | 188-206 | ACUGGAAGGGGAAGUGGCA | 1146 | 188-206 |
| AD-70670 | UUCCAGUACCACCGGCAGA | 963 | 200-218 | UCUGCCGGUGGUACUGGAA | 1147 | 200-218 |
| AD-70671 | ACCGGCAGCUGUACCACAA | 964 | 210-228 | UUGUGGUACAGCUGCCGGU | 1148 | 210-228 |
| AD-70672 | UACCACAAAUGUACCCACA | 965 | 221-239 | UGUGGGUACAUUUGUGGUA | 1149 | 221-239 |
| AD-70673 | UACCCACAAGGGCCGGCCA | 966 | 232-250 | UGGCCGGCCCUUGUGGGUA | 1150 | 232-250 |
| AD-70674 | GCCGGCCAGGCCCUCAGCA | 967 | 243-261 | UGCUGAGGGCCUGGCCGGC | 1151 | 243-261 |
| AD-70675 | CUCAGCCCUGGUGUGCUAA | 968 | 255-273 | UUAGCACACCAGGGCUGAG | 1152 | 255-273 |
| AD-70676 | UGUGCUACCACCCCCAACU | 969 | 266-284 | AGUUGGGGGUGGUAGCACA | 1153 | 266-284 |
| AD-70677 | ACCCCCAACUUUGAUCAGA | 970 | 275-293 | UCUGAUCAAAGUUGGGGGU | 1154 | 275-293 |
| AD-70678 | AUCAGGACCAGCGAUGGGA | 971 | 288-306 | UCCCAUCGCUGGUCCUGAU | 1155 | 288-306 |
| AD-70679 | AGCGAUGGGGAUACUGUUU | 972 | 297-315 | AAACAGUAUCCCCAUCGCU | 1156 | 297-315 |
| AD-70680 | UACUGUUUGGAGCCCAAGA | 973 | 308-326 | UCUUGGGCUCCAAACAGUA | 1157 | 308-326 |
| AD-70681 | CCAAGAAAGUGAAAGACCA | 974 | 321-339 | UGGUCUUUCACUUUCUUGG | 1158 | 321-339 |
| AD-70682 | AAAGACCACUGCAGCAAAC | 975 | 332-350 | GUUUGCUGCAGUGGUCUUU | 1159 | 332-350 |
| AD-70683 | UGCAGCAAACACAGCCCCU | 976 | 341-359 | AGGGGCUGUGUUUGCUGCA | 1160 | 341-359 |
| AD-70684 | AGCCCCUGCCAGAAAGGAA | 977 | 353-371 | UUCCUUUCUGGCAGGGGCU | 1161 | 353-371 |
| AD-70685 | AGAAAGGAGGGACCUGUGU | 978 | 363-381 | ACACAGGUCCCUCCUUUCU | 1162 | 363-381 |
| AD-70686 | ACCUGUGUGAACAUGCCAA | 979 | 374-392 | UUGGCAUGUUCACACAGGU | 1163 | 374-392 |
| AD-70687 | AUGCCAAGCGGCCCCCACU | 980 | 386-404 | AGUGGGGGCCGCUUGGCAU | 1164 | 386-404 |
| AD-70688 | GCCCCCACUGUCUCUGUCA | 981 | 396-414 | UGACAGAGACAGUGGGGGC | 1165 | 396-414 |
| AD-70689 | CACCUCACUGGAAACCACU | 982 | 419-437 | AGUGGUUUCCAGUGAGGUG | 1166 | 419-437 |
| AD-70690 | AACCACUGCCAGAAAGAGA | 983 | 431-449 | UCUCUUUCUGGCAGUGGUU | 1167 | 431-449 |
| AD-70691 | CAGAAAGAGAAGUGCUUUA | 984 | 440-458 | UAAAGCACUUCUCUUUCUG | 1168 | 440-458 |
| AD-70692 | UGCUUUGAGCCUCAGCUUA | 985 | 452-470 | UAAGCUGAGGCUCAAAGCA | 1169 | 452-470 |
| AD-70693 | CAGCUUCUCCGGUUUUUCA | 986 | 464-482 | UGAAAAACCGGAGAAGCUG | 1170 | 464-482 |
| AD-70694 | CGGUUUUUCCACAAGAAUA | 987 | 473-491 | UAUUCUUGUGGAAAAACCG | 1171 | 473-491 |
| AD-70695 | CAAGAAUGAGAUAUGGUAU | 988 | 484-502 | AUACCAUAUCUCAUUCUUG | 1172 | 484-502 |
| AD-70696 | UAUGGUAUAGAACUGAGCA | 989 | 495-513 | UGCUCAGUUCUAUACCAUA | 1173 | 495-513 |
| AD-70697 | UGAGCAAGCAGCUGUGGCA | 990 | 508-526 | UGCCACAGCUGCUUGCUCA | 1174 | 508-526 |
| AD-70698 | GCUGUGGCCAGAUGCCAGU | 991 | 518-536 | ACUGGCAUCUGGCCACAGC | 1175 | 518-536 |
| AD-70699 | AUGCCAGUGCAAGGGUCCU | 992 | 529-547 | AGGACCCUUGCACUGGCAU | 1176 | 529-547 |
| AD-70700 | AAGGGUCCUGAUGCCCACU | 993 | 539-557 | AGUGGGCAUCAGGACCCUU | 1177 | 539-557 |
| AD-70701 | UGCCCACUGCCAGCGGCUA | 994 | 550-568 | UAGCCGCUGGCAGUGGGCA | 1178 | 550-568 |
| AD-70702 | CGGCUGGCCAGCCAGGCCU | 995 | 563-581 | AGGCCUGGCUGGCCAGCCG | 1179 | 563-581 |
| AD-70703 | AGCCAGGCCUGCCGCACCA | 996 | 572-590 | UGGUGCGGCAGGCCUGGCU | 1180 | 572-590 |
| AD-70704 | CGCACCAACCCGUGCCUCA | 997 | 584-602 | UGAGGCACGGGUUGGUGCG | 1181 | 584-602 |
| AD-70705 | UGCCUCCAUGGGGGUCGCU | 998 | 596-614 | AGCGACCCCCAUGGAGGCA | 1182 | 596-614 |
| AD-70706 | GGGGUCGCUGCCUAGAGGU | 999 | 606-624 | ACCUCUAGGCAGCGACCCC | 1183 | 606-624 |
| AD-70707 | CUAGAGGUGGAGGGCCACA | 1000 | 617-635 | UGUGGCCCUCCACCUCUAG | 1184 | 617-635 |
| AD-70708 | AGGGCCACCGCCUGUGCCA | 1001 | 627-645 | UGGCACAGGCGGUGGCCCU | 1185 | 627-645 |
| AD-70709 | UGUGCCACUGCCCGGUGGA | 1002 | 639-657 | UCCACCGGGCAGUGGCACA | 1186 | 639-657 |
| AD-70710 | CGGUGGGCUACACCGGAGA | 1003 | 651-669 | UCUCCGGUGUAGCCCACCG | 1187 | 651-669 |
| AD-70711 | ACCGGAGCCUUCUGCGACA | 1004 | 662-680 | UGUCGCAGAAGGCUCCGGU | 1188 | 662-680 |
| AD-70712 | UUCUGCGACGUGGACACCA | 1005 | 671-689 | UGGUGUCCACGUCGCAGAA | 1189 | 671-689 |
| AD-70713 | GACACCAAGGCAAGCUGCU | 1006 | 683-701 | AGCAGCUUGCCUUGGUGUC | 1190 | 683-701 |
| AD-70714 | CAAGCUGCUAUGAUGGCCA | 1007 | 693-711 | UGGCCAUCAUAGCAGCUUG | 1191 | 693-711 |
| AD-70715 | GAUGGCCGCGGGCUCAGCU | 1008 | 704-722 | AGCUGAGCCCGCGGCCAUC | 1192 | 704-722 |
| AD-70716 | UCAGCUACCGCGGCCUGGA | 1009 | 717-735 | UCCAGGCCGCGGUAGCUGA | 1193 | 717-735 |
| AD-70717 | CGGCCUGGCCAGGACCACA | 1010 | 727-745 | UGUGGUCCUGGCCAGGCCG | 1194 | 727-745 |
| AD-70718 | AGGACCACGCUCUCGGGUA | 1011 | 737-755 | UACCCGAGAGCGUGGUCCU | 1195 | 737-755 |
| AD-70719 | UCGGGUGCGCCCUGUCAGA | 1012 | 749-767 | UCUGACAGGGCGCACCCGA | 1196 | 749-767 |
| AD-70720 | CUGUCAGCCGUGGGCCUCA | 1013 | 760-778 | UGAGGCCCACGGCUGACAG | 1197 | 760-778 |
| AD-70721 | UGGGCCUCGGAGGCCACCU | 1014 | 770-788 | AGGUGGCCUCCGAGGCCCA | 1198 | 770-788 |
| AD-70722 | CCACCUACCGGAACGUGAA | 1015 | 783-801 | UUCACGUUCCGGUAGGUGG | 1199 | 783-801 |
| AD-70723 | AACGUGACUGCCGAGCAAA | 1016 | 794-812 | UUUGCUCGGCAGUCACGUU | 1200 | 794-812 |
| AD-70724 | CGAGCAAGCGCGGAACUGA | 1017 | 805-823 | UCAGUUCCGCGCUUGCUCG | 1201 | 805-823 |
| AD-70725 | CGGAACUGGGGACUGGGCA | 1018 | 815-833 | UGCCCAGUCCCCAGUUCCG | 1202 | 815-833 |
| AD-70726 | GACUGGGCGGCCACGCCUU | 1019 | 825-843 | AAGGCGUGGCCGCCCAGUC | 1203 | 825-843 |
| AD-70727 | ACGCCUUCUGCCGGAACCA | 1020 | 837-855 | UGGUUCCGGCAGAAGGCGU | 1204 | 837-855 |
| AD-70728 | CGGAACCCGGACAACGACA | 1021 | 848-866 | UGUCGUUGUCCGGGUUCCG | 1205 | 848-866 |
| AD-70729 | AACGACAUCCGCCCGUGGU | 1022 | 860-878 | ACCACGGGCGGAUGUCGUU | 1206 | 860-878 |
| AD-70730 | GCCCGUGGUGCUUCGUGCU | 1023 | 870-888 | AGCACGAAGCACCACGGGC | 1207 | 870-888 |
| AD-70731 | UUCGUGCUGAACCGCGACA | 1024 | 881-899 | UGUCGCGGUUCAGCACGAA | 1208 | 881-899 |
| AD-70732 | ACCGCGACCGGCUGAGCUA | 1025 | 891-909 | UAGCUCAGCCGGUCGCGGU | 1209 | 891-909 |
| AD-70733 | CUGAGCUGGGAGUACUGCA | 1026 | 902-920 | UGCAGUACUCCCAGCUCAG | 1210 | 902-920 |
| AD-70734 | UACUGCGACCUGGCACAGU | 1027 | 914-932 | ACUGUGCCAGGUCGCAGUA | 1211 | 914-932 |
| AD-70735 | UGGCACAGUGCCAGACCCA | 1028 | 924-942 | UGGGUCUGGCACUGUGCCA | 1212 | 924-942 |
| AD-70736 | AGACCCCAACCCAGGCGGA | 1029 | 936-954 | UCCGCCUGGGUUGGGGUCU | 1213 | 936-954 |
| AD-70737 | AGGCGGCGCCUCCGACCCA | 1030 | 948-966 | UGGGUCGGAGGCGCCGCCU | 1214 | 948-966 |
| AD-70738 | UCCGACCCCGGUGUCCCCU | 1031 | 958-976 | AGGGGACACCGGGGUCGGA | 1215 | 958-976 |
| AD-70739 | UGUCCCCUAGGCUUCAUGU | 1032 | 969-987 | ACAUGAAGCCUAGGGGACA | 1216 | 969-987 |
| AD-70740 | UUCAUGUCCCACUCAUGCA | 1033 | 981-999 | UGCAUGAGUGGGACAUGAA | 1217 | 981-999 |
| AD-70741 | ACUCAUGCCCGCGCAGCCA | 1034 | 991-1009 | UGGCUGCGCGGGCAUGAGU | 1218 | 991-1009 |
| AD-70742 | CGCAGCCGGCACCGCCGAA | 1035 | 1002-1020 | UUCGGCGGUGCCGGCUGCG | 1219 | 1002-1020 |
| AD-70743 | ACCGCCGAAGCCUCAGCCA | 1036 | 1012-1030 | UGGCUGAGGCUUCGGCGGU | 1220 | 1012-1030 |
| AD-70744 | UCAGCCCACGACCCGGACA | 1037 | 1024-1042 | UGUCCGGGUCGUGGGCUGA | 1221 | 1024-1042 |
| AD-70745 | ACCCGGACCCCGCCUCAGU | 1038 | 1034-1052 | ACUGAGGCGGGGUCCGGGU | 1222 | 1034-1052 |
| AD-70562 | CCUCAGUCCCAGACCCCGA | 1039 | 1046-1064 | UCGGGGUCUGGGACUGAGG | 1223 | 1046-1064 |
| AD-70563 | AGACCCCGGGAGCCUUGCA | 1040 | 1056-1074 | UGCAAGGCUCCCGGGGUCU | 1224 | 1056-1074 |
| AD-70564 | CCUUGCCGGCGAAGCGGGA | 1041 | 1068-1086 | UCCCGCUUCGCCGGCAAGG | 1225 | 1068-1086 |
| AD-70565 | AAGCGGGAGCAGCCGCCUU | 1042 | 1079-1097 | AAGGCGGCUGCUCCCGCUU | 1226 | 1079-1097 |
| AD-70566 | AGCCGCCUUCCCUGACCAA | 1043 | 1089-1107 | UUGGUCAGGGAAGGCGGCU | 1227 | 1089-1107 |
| AD-70567 | UGACCAGGAACGGCCCACU | 1044 | 1101-1119 | AGUGGGCCGUUCCUGGUCA | 1228 | 1101-1119 |
| AD-70568 | CGGCCCACUGAGCUGCGGA | 1045 | 1111-1129 | UCCGCAGCUCAGUGGGCCG | 1229 | 1111-1129 |
| AD-70569 | UGCGGGCAGCGGCUCCGCA | 1046 | 1124-1142 | UGCGGAGCCGCUGCCCGCA | 1230 | 1124-1142 |
| AD-70570 | CGGCUCCGCAAGAGUCUGU | 1047 | 1133-1151 | ACAGACUCUUGCGGAGCCG | 1231 | 1133-1151 |
| AD-70571 | AGUCUGUCUUCGAUGACCA | 1048 | 1145-1163 | UGGUCAUCGAAGACAGACU | 1232 | 1145-1163 |
| AD-70572 | CGAUGACCCGCGUCGUUGA | 1049 | 1155-1173 | UCAACGACGCGGGUCAUCG | 1233 | 1155-1173 |
| AD-70573 | UCGUUGGCGGGCUGGUGGA | 1050 | 1167-1185 | UCCACCAGCCCGCCAACGA | 1234 | 1167-1185 |
| AD-70574 | UGGUGGCGCUACGCGGGGA | 1051 | 1179-1197 | UCCCCGCGUAGCGCCACCA | 1235 | 1179-1197 |
| AD-70575 | UACGCGGGGCGCACCCCUA | 1052 | 1188-1206 | UAGGGGUGCGCCCCGCGUA | 1236 | 1188-1206 |
| AD-70576 | ACCCCUACAUCGCCGCGCU | 1053 | 1200-1218 | AGCGCGGCGAUGUAGGGGU | 1237 | 1200-1218 |
| AD-70577 | GCCGCGCUGUACUGGGGCA | 1054 | 1211-1229 | UGCCCCAGUACAGCGCGGC | 1238 | 1211-1229 |
| AD-70578 | CUGGGGCCACAGUUUCUGA | 1055 | 1222-1240 | UCAGAAACUGUGGCCCCAG | 1239 | 1222-1240 |
| AD-70579 | UUUCUGCGCCGGCAGCCUA | 1056 | 1234-1252 | UAGGCUGCCGGCGCAGAAA | 1240 | 1234-1252 |
| AD-70580 | CGGCAGCCUCAUCGCCCCA | 1057 | 1243-1261 | UGGGGCGAUGAGGCUGCCG | 1241 | 1243-1261 |
| AD-70581 | UCGCCCCCUGCUGGGUGCU | 1058 | 1254-1272 | AGCACCCAGCAGGGGGCGA | 1242 | 1254-1272 |
| AD-70582 | UGGGUGCUGACGGCCGCUA | 1059 | 1265-1283 | UAGCGGCCGUCAGCACCCA | 1243 | 1265-1283 |
| AD-70583 | GCCGCUCACUGCCUGCAGA | 1060 | 1277-1295 | UCUGCAGGCAGUGAGCGGC | 1244 | 1277-1295 |
| AD-70584 | CUGCAGGACCGGCCCGCAA | 1061 | 1289-1307 | UUGCGGGCCGGUCCUGCAG | 1245 | 1289-1307 |
| AD-70585 | GGCCCGCACCCGAGGAUCU | 1062 | 1299-1317 | AGAUCCUCGGGUGCGGGCC | 1246 | 1299-1317 |
| AD-70586 | CGAGGAUCUGACGGUGGUA | 1063 | 1309-1327 | UACCACCGUCAGAUCCUCG | 1247 | 1309-1327 |
| AD-70587 | GUGGUGCUCGGCCAGGAAA | 1064 | 1322-1340 | UUUCCUGGCCGAGCACCAC | 1248 | 1322-1340 |
| AD-70588 | GCCAGGAACGCCGUAACCA | 1065 | 1332-1350 | UGGUUACGGCGUUCCUGGC | 1249 | 1332-1350 |
| AD-70589 | CGUAACCACAGCUGUGAGA | 1066 | 1343-1361 | UCUCACAGCUGUGGUUACG | 1250 | 1343-1361 |
| AD-70590 | UGUGAGCCGUGCCAGACGU | 1067 | 1355-1373 | ACGUCUGGCACGGCUCACA | 1251 | 1355-1373 |
| AD-70591 | UGCCAGACGUUGGCCGUGA | 1068 | 1364-1382 | UCACGGCCAACGUCUGGCA | 1252 | 1364-1382 |
| AD-70592 | GCCGUGCGCUCCUACCGCU | 1069 | 1376-1394 | AGCGGUAGGAGCGCACGGC | 1253 | 1376-1394 |
| AD-70593 | UACCGCUUGCACGAGGCCU | 1070 | 1388-1406 | AGGCCUCGUGCAAGCGGUA | 1254 | 1388-1406 |
| AD-70594 | ACGAGGCCUUCUCGCCCGU | 1071 | 1398-1416 | ACGGGCGAGAAGGCCUCGU | 1255 | 1398-1416 |
| AD-70595 | UCGCCCGUCAGCUACCAGA | 1072 | 1409-1427 | UCUGGUAGCUGACGGGCGA | 1256 | 1409-1427 |
| AD-70596 | CUACCAGCACGACCUGGCU | 1073 | 1420-1438 | AGCCAGGUCGUGCUGGUAG | 1257 | 1420-1438 |
| AD-70597 | ACCUGGCUCUGUUGCGCCU | 1074 | 1431-1449 | AGGCGCAACAGAGCCAGGU | 1258 | 1431-1449 |
| AD-70598 | UUGCGCCUUCAGGAGGAUA | 1075 | 1442-1460 | UAUCCUCCUGAAGGCGCAA | 1259 | 1442-1460 |
| AD-70599 | GAGGAUGCGGACGGCAGCU | 1076 | 1454-1472 | AGCUGCCGUCCGCAUCCUC | 1260 | 1454-1472 |
| AD-70600 | ACGGCAGCUGCGCGCUCCU | 1077 | 1464-1482 | AGGAGCGCGCAGCUGCCGU | 1261 | 1464-1482 |
| AD-70601 | CGCUCCUGUCGCCUUACGU | 1078 | 1476-1494 | ACGUAAGGCGACAGGAGCG | 1262 | 1476-1494 |
| AD-70602 | CCUUACGUUCAGCCGGUGU | 1079 | 1487-1505 | ACACCGGCUGAACGUAAGG | 1263 | 1487-1505 |
| AD-70603 | AGCCGGUGUGCCUGCCAAA | 1080 | 1497-1515 | UUUGGCAGGCACACCGGCU | 1264 | 1497-1515 |
| AD-70604 | UGCCAAGCGGCGCCGCGCA | 1081 | 1509-1527 | UGCGCGGCGCCGCUUGGCA | 1265 | 1509-1527 |
| AD-70605 | GCGCCGCGCGACCCUCCGA | 1082 | 1518-1536 | UCGGAGGGUCGCGCGGCGC | 1266 | 1518-1536 |
| AD-70606 | CCCUCCGAGACCACGCUCU | 1083 | 1529-1547 | AGAGCGUGGUCUCGGAGGG | 1267 | 1529-1547 |
| AD-70607 | CGCUCUGCCAGGUGGCCGA | 1084 | 1542-1560 | UCGGCCACCUGGCAGAGCG | 1268 | 1542-1560 |
| AD-70608 | AGGUGGCCGGCUGGGGCCA | 1085 | 1551-1569 | UGGCCCCAGCCGGCCACCU | 1269 | 1551-1569 |
| AD-70609 | UGGGGCCACCAGUUCGAGA | 1086 | 1562-1580 | UCUCGAACUGGUGGCCCCA | 1270 | 1562-1580 |
| AD-70610 | UUCGAGGGGGCGGAGGAAU | 1087 | 1574-1592 | AUUCCUCCGCCCCCUCGAA | 1271 | 1574-1592 |
| AD-70611 | CGGAGGAAUAUGCCAGCUU | 1088 | 1584-1602 | AAGCUGGCAUAUUCCUCCG | 1272 | 1584-1602 |
| AD-70612 | CAGCUUCCUGCAGGAGGCA | 1089 | 1597-1615 | UGCCUCCUGCAGGAAGCUG | 1273 | 1597-1615 |
| AD-70613 | AGGAGGCGCAGGUACCGUU | 1090 | 1608-1626 | AACGGUACCUGCGCCUCCU | 1274 | 1608-1626 |
| AD-70614 | AGGUACCGUUCCUCUCCCU | 1091 | 1617-1635 | AGGGAGAGGAACGGUACCU | 1275 | 1617-1635 |
| AD-70615 | CUCUCCCUGGAGCGCUGCU | 1092 | 1628-1646 | AGCAGCGCUCCAGGGAGAG | 1276 | 1628-1646 |
| AD-70616 | CGCUGCUCAGCCCCGGACA | 1093 | 1640-1658 | UGUCCGGGGCUGAGCAGCG | 1277 | 1640-1658 |
| AD-70617 | CCGGACGUGCACGGAUCCU | 1094 | 1652-1670 | AGGAUCCGUGCACGUCCGG | 1278 | 1652-1670 |
| AD-70618 | CGGAUCCUCCAUCCUCCCA | 1095 | 1663-1681 | UGGGAGGAUGGAGGAUCCG | 1279 | 1663-1681 |
| AD-70619 | CAUCCUCCCCGGCAUGCUA | 1096 | 1672-1690 | UAGCAUGCCGGGGAGGAUG | 1280 | 1672-1690 |
| AD-70620 | CAUGCUCUGCGCAGGGUUA | 1097 | 1684-1702 | UAACCCUGCGCAGAGCAUG | 1281 | 1684-1702 |
| AD-70621 | AGGGUUCCUCGAGGGCGGA | 1098 | 1696-1714 | UCCGCCCUCGAGGAACCCU | 1282 | 1696-1714 |
| AD-70622 | GAGGGCGGCACCGAUGCGU | 1099 | 1706-1724 | ACGCAUCGGUGCCGCCCUC | 1283 | 1706-1724 |
| AD-70623 | GAUGCGUGCCAGGGUGAUU | 1100 | 1718-1736 | AAUCACCCUGGCACGCAUC | 1284 | 1718-1736 |
| AD-70624 | AGGGUGAUUCCGGAGGCCA | 1101 | 1728-1746 | UGGCCUCCGGAAUCACCCU | 1285 | 1728-1746 |
| AD-70625 | CGGAGGCCCGCUGGUGUGU | 1102 | 1738-1756 | ACACACCAGCGGGCCUCCG | 1286 | 1738-1756 |
| AD-70626 | GGUGUGUGAGGACCAAGCU | 1103 | 1750-1768 | AGCUUGGUCCUCACACACC | 1287 | 1750-1768 |
| AD-70627 | CCAAGCUGCAGAGCGCCGA | 1104 | 1762-1780 | UCGGCGCUCUGCAGCUUGG | 1288 | 1762-1780 |
| AD-70628 | AGAGCGCCGGCUCACCCUA | 1105 | 1771-1789 | UAGGGUGAGCCGGCGCUCU | 1289 | 1771-1789 |
| AD-70629 | UCACCCUGCAAGGCAUCAU | 1106 | 1782-1800 | AUGAUGCCUUGCAGGGUGA | 1290 | 1782-1800 |
| AD-70630 | GGCAUCAUCAGCUGGGGAU | 1107 | 1793-1811 | AUCCCCAGCUGAUGAUGCC | 1291 | 1793-1811 |
| AD-70631 | CUGGGGAUCGGGCUGUGGU | 1108 | 1804-1822 | ACCACAGCCCGAUCCCCAG | 1292 | 1804-1822 |
| AD-70632 | UGUGGUGACCGCAACAAGA | 1109 | 1817-1835 | UCUUGUUGCGGUCACCACA | 1293 | 1817-1835 |
| AD-70633 | CAACAAGCCAGGCGUCUAA | 1110 | 1828-1846 | UUAGACGCCUGGCUUGUUG | 1294 | 1828-1846 |
| AD-70634 | AGGCGUCUACACCGAUGUA | 1111 | 1837-1855 | UACAUCGGUGUAGACGCCU | 1295 | 1837-1855 |
| AD-70635 | GAUGUGGCCUACUACCUGA | 1112 | 1850-1868 | UCAGGUAGUAGGCCACAUC | 1296 | 1850-1868 |
| AD-70636 | UACUACCUGGCCUGGAUCA | 1113 | 1859-1877 | UGAUCCAGGCCAGGUAGUA | 1297 | 1859-1877 |
| AD-70637 | CUGGAUCCGGGAGCACACA | 1114 | 1870-1888 | UGUGUGCUCCCGGAUCCAG | 1298 | 1870-1888 |
| AD-70638 | AGCACACCGUUUCCUGAUU | 1115 | 1881-1899 | AAUCAGGAAACGGUGUGCU | 1299 | 1881-1899 |
| AD-70639 | UCCUGAUUGCUCAGGGACU | 1116 | 1892-1910 | AGUCCCUGAGCAAUCAGGA | 1300 | 1892-1910 |
| AD-70640 | CAGGGACUCAUCUUUCCCU | 1117 | 1903-1921 | AGGGAAAGAUGAGUCCCUG | 1301 | 1903-1921 |
| AD-70641 | UUUCCCUCCUUGGUGAUUA | 1118 | 1915-1933 | UAAUCACCAAGGAGGGAAA | 1302 | 1915-1933 |
| AD-70642 | UGGUGAUUCCGCAGUGAGA | 1119 | 1925-1943 | UCUCACUGCGGAAUCACCA | 1303 | 1925-1943 |
| AD-70643 | AGUGAGAGAGUGGCUGGGA | 1120 | 1937-1955 | UCCCAGCCACUCUCUCACU | 1304 | 1937-1955 |
| AD-70644 | GCUGGGGCAUGGAAGGCAA | 1121 | 1949-1967 | UUGCCUUCCAUGCCCCAGC | 1305 | 1949-1967 |
| AD-70645 | UGGAAGGCAAGAUUGUGUA | 1122 | 1958-1976 | UACACAAUCUUGCCUUCCA | 1306 | 1958-1976 |
| AD-70646 | UUGUGUCCCAUUCCCCCAA | 1123 | 1970-1988 | UUGGGGGAAUGGGACACAA | 1307 | 1970-1988 |
| AD-70647 | UCCCCCAGUGCGGCCAGCU | 1124 | 1981-1999 | AGCUGGCCGCACUGGGGGA | 1308 | 1981-1999 |
| AD-70648 | GCCAGCUCCGCGCCAGGAU | 1125 | 1993-2011 | AUCCUGGCGCGGAGCUGGC | 1309 | 1993-2011 |
| AD-70649 | GCCAGGAUGGCGCAGGAAA | 1126 | 2004-2022 | UUUCCUGCGCCAUCCUGGC | 1310 | 2004-2022 |
| AD-70650 | GCAGGAACUCAAUAAAGUA | 1127 | 2015-2033 | UACUUUAUUGAGUUCCUGC | 1311 | 2015-2033 |
| AD-70651 | AAUAAAGUGCUUUGAAAAU | 1128 | 2025-2043 | AUUUUCAAAGCACUUUAUU | 1312 | 2025-2043 |
| AD-70652 | UUGAAAAUGCUGAGAAAAA | 1129 | 2036-2054 | UUUUUCUCAGCAUUUUCAA | 1313 | 2036-2054 |

TABLE 12
F12 Modified Sequences

| | | SEQ | | SEQ | | SEQ |
|---|---|---|---|---|---|---|
| Duplex | | ID | Antisense Sequence | ID | mRNA target | ID |
| Name | Sense Sequence 5′ to 3′ | NO | 5′ to 3′ | NO | sequence | NO |
| AD-70653 | GACUCCUGGAUAGGCAGCUdTdT | 1314 | AGCUGCCUAUCCAGGAGUCdTdT | 1498 | GACUCCUGGAUAGGCAGCU | 1682 |
| AD-70654 | UAGGCAGCUGGACCAACGAdTdT | 1315 | UCGUUGGUCCAGCUGCCUAdTdT | 1499 | UAGGCAGCUGGACCAACGG | 1683 |
| AD-70655 | ACCAACGGACGGAUGCCAUdTdT | 1316 | AUGGCAUCCGUCCGUUGGUdTdT | 1500 | ACCAACGGACGGAUGCCAU | 1684 |
| AD-70656 | AUGCCAUGAGGGCUCUGCUdTdT | 1317 | AGCAGAGCCCUCAUGGCAUdTdT | 1501 | AUGCCAUGAGGGCUCUGCU | 1685 |
| AD-70657 | GCUCUGCUGCUCCUGGGGUdTdT | 1318 | ACCCCAGGAGCAGCAGAGCdTdT | 1502 | GCUCUGCUGCUCCUGGGGU | 1686 |
| AD-70658 | UCCUGGGGUUCCUGCUGGUdTdT | 1319 | ACCAGCAGGAACCCCAGGAdTdT | 1503 | UCCUGGGGUUCCUGCUGGU | 1687 |
| AD-70659 | CUGCUGGUGAGCUUGGAGUdTdT | 1320 | ACUCCAAGCUCACCAGCAGdTdT | 1504 | CUGCUGGUGAGCUUGGAGU | 1688 |
| AD-70660 | CUUGGAGUCAACACUUUCAdTdT | 1321 | UGAAAGUGUUGACUCCAAGdTdT | 1505 | CUUGGAGUCAACACUUUCG | 1689 |
| AD-70661 | ACUUUCGAUUCCACCUUGAdTdT | 1322 | UCAAGGUGGAAUCGAAAGUdTdT | 1506 | ACUUUCGAUUCCACCUUGG | 1690 |
| AD-70662 | CCACCUUGGGAAGCCCCCAdTdT | 1323 | UGGGGGCUUCCCAAGGUGGdTdT | 1507 | CCACCUUGGGAAGCCCCCA | 1691 |
| AD-70663 | GCCCCCAAGGAGCAUAAGUdTdT | 1324 | ACUUAUGCUCCUUGGGGGCdTdT | 1508 | GCCCCCAAGGAGCAUAAGU | 1692 |
| AD-70664 | CAUAAGUACAAAGCUGAAAdTdT | 1325 | UUUCAGCUUUGUACUUAUGdTdT | 1509 | CAUAAGUACAAAGCUGAAG | 1693 |
| AD-70665 | AAGCUGAAGAGCACACAGUdTdT | 1326 | ACUGUGUGCUCUUCAGCUUdTdT | 1510 | AAGCUGAAGAGCACACAGU | 1694 |
| AD-70666 | ACACAGUCGUUCUCACUGUdTdT | 1327 | ACAGUGAGAACGACUGUGUdTdT | 1511 | ACACAGUCGUUCUCACUGU | 1695 |
| AD-70667 | UUCUCACUGUCACCGGGGAdTdT | 1328 | UCCCCGGUGACAGUGAGAAdTdT | 1512 | UUCUCACUGUCACCGGGGA | 1696 |
| AD-70668 | ACCGGGGAGCCCUGCCACUdTdT | 1329 | AGUGGCAGGGCUCCCCGGUdTdT | 1513 | ACCGGGGAGCCCUGCCACU | 1697 |
| AD-70669 | UGCCACUUCCCCUUCCAGUdTdT | 1330 | ACUGGAAGGGGAAGUGGCAdTdT | 1514 | UGCCACUUCCCCUUCCAGU | 1698 |
| AD-70670 | UUCCAGUACCACCGGCAGAdTdT | 1331 | UCUGCCGGUGGUACUGGAAdTdT | 1515 | UUCCAGUACCACCGGCAGC | 1699 |
| AD-70671 | ACCGGCAGCUGUACCACAAdTdT | 1332 | UUGUGGUACAGCUGCCGGUdTdT | 1516 | ACCGGCAGCUGUACCACAA | 1700 |
| AD-70672 | UACCACAAAUGUACCCACAdTdT | 1333 | UGUGGGUACAUUUGUGGUAdTdT | 1517 | UACCACAAAUGUACCCACA | 1701 |
| AD-70673 | UACCCACAAGGGCCGGCCAdTdT | 1334 | UGGCCGGCCCUUGUGGGUAdTdT | 1518 | UACCCACAAGGGCCGGCCA | 1702 |
| AD-70674 | GCCGGCCAGGCCCUCAGCAdTdT | 1335 | UGCUGAGGGCCUGGCCGGCdTdT | 1519 | GCCGGCCAGGCCCUCAGCC | 1703 |
| AD-70675 | CUCAGCCCUGGUGUGCUAAdTdT | 1336 | UUAGCACACCAGGGCUGAGdTdT | 1520 | CUCAGCCCUGGUGUGCUAC | 1704 |
| AD-70676 | UGUGCUACCACCCCCAACUdTdT | 1337 | AGUUGGGGGUGGUAGCACAdTdT | 1521 | UGUGCUACCACCCCCAACU | 1705 |
| AD-70677 | ACCCCCAACUUUGAUCAGAdTdT | 1338 | UCUGAUCAAAGUUGGGGGUdTdT | 1522 | ACCCCCAACUUUGAUCAGG | 1706 |
| AD-70678 | AUCAGGACCAGCGAUGGGAdTdT | 1339 | UCCCAUCGCUGGUCCUGAUdTdT | 1523 | AUCAGGACCAGCGAUGGGG | 1707 |
| AD-70679 | AGCGAUGGGGAUACUGUUUdTdT | 1340 | AAACAGUAUCCCCAUCGCUdTdT | 1524 | AGCGAUGGGGAUACUGUUU | 1708 |
| AD-70680 | UACUGUUUGGAGCCCAAGAdTdT | 1341 | UCUUGGGCUCCAAACAGUAdTdT | 1525 | UACUGUUUGGAGCCCAAGA | 1709 |
| AD-70681 | CCAAGAAAGUGAAAGACCAdTdT | 1342 | UGGUCUUUCACUUUCUUGGdTdT | 1526 | CCAAGAAAGUGAAAGACCA | 1710 |
| AD-70682 | AAAGACCACUGCAGCAAACdTdT | 1343 | GUUUGCUGCAGUGGUCUUUdTdT | 1527 | AAAGACCACUGCAGCAAAC | 1711 |
| AD-70683 | UGCAGCAAACACAGCCCCUdTdT | 1344 | AGGGGCUGUGUUUGCUGCAdTdT | 1528 | UGCAGCAAACACAGCCCCU | 1712 |
| AD-70684 | AGCCCCUGCCAGAAAGGAAdTdT | 1345 | UUCCUUUCUGGCAGGGGCUdTdT | 1529 | AGCCCCUGCCAGAAAGGAG | 1713 |
| AD-70685 | AGAAAGGAGGGACCUGUGUdTdT | 1346 | ACACAGGUCCCUCCUUUCUdTdT | 1530 | AGAAAGGAGGGACCUGUGU | 1714 |
| AD-70686 | ACCUGUGUGAACAUGCCAAdTdT | 1347 | UUGGCAUGUUCACACAGGUdTdT | 1531 | ACCUGUGUGAACAUGCCAA | 1715 |
| AD-70687 | AUGCCAAGCGGCCCCCACUdTdT | 1348 | AGUGGGGGCCGCUUGGCAUdTdT | 1532 | AUGCCAAGCGGCCCCCACU | 1716 |
| AD-70688 | GCCCCCACUGUCUCUGUCAdTdT | 1349 | UGACAGAGACAGUGGGGGCdTdT | 1533 | GCCCCCACUGUCUCUGUCC | 1717 |
| AD-70689 | CACCUCACUGGAAACCACUdTdT | 1350 | AGUGGUUUCCAGUGAGGUGdTdT | 1534 | CACCUCACUGGAAACCACU | 1718 |
| AD-70690 | AACCACUGCCAGAAAGAGAdTdT | 1351 | UCUCUUUCUGGCAGUGGUUdTdT | 1535 | AACCACUGCCAGAAAGAGA | 1719 |
| AD-70691 | CAGAAAGAGAAGUGCUUUAdTdT | 1352 | UAAAGCACUUCUCUUUCUGdTdT | 1536 | CAGAAAGAGAAGUGCUUUG | 1720 |
| AD-70692 | UGCUUUGAGCCUCAGCUUAdTdT | 1353 | UAAGCUGAGGCUCAAAGCAdTdT | 1537 | UGCUUUGAGCCUCAGCUUC | 1721 |
| AD-70693 | CAGCUUCUCCGGUUUUUCAdTdT | 1354 | UGAAAAACCGGAGAAGCUGdTdT | 1538 | CAGCUUCUCCGGUUUUUCC | 1722 |
| AD-70694 | CGGUUUUUCCACAAGAAUAdTdT | 1355 | UAUUCUUGUGGAAAAACCGdTdT | 1539 | CGGUUUUUCCACAAGAAUG | 1723 |
| AD-70695 | CAAGAAUGAGAUAUGGUAUdTdT | 1356 | AUACCAUAUCUCAUUCUUGdTdT | 1540 | CAAGAAUGAGAUAUGGUAU | 1724 |
| AD-70696 | UAUGGUAUAGAACUGAGCAdTdT | 1357 | UGCUCAGUUCUAUACCAUAdTdT | 1541 | UAUGGUAUAGAACUGAGCA | 1725 |
| AD-70697 | UGAGCAAGCAGCUGUGGCAdTdT | 1358 | UGCCACAGCUGCUUGCUCAdTdT | 1542 | UGAGCAAGCAGCUGUGGCC | 1726 |
| AD-70698 | GCUGUGGCCAGAUGCCAGUdTdT | 1359 | ACUGGCAUCUGGCCACAGCdTdT | 1543 | GCUGUGGCCAGAUGCCAGU | 1727 |
| AD-70699 | AUGCCAGUGCAAGGGUCCUdTdT | 1360 | AGGACCCUUGCACUGGCAUdTdT | 1544 | AUGCCAGUGCAAGGGUCCU | 1728 |
| AD-70700 | AAGGGUCCUGAUGCCCACUdTdT | 1361 | AGUGGGCAUCAGGACCCUUdTdT | 1545 | AAGGGUCCUGAUGCCCACU | 1729 |
| AD-70701 | UGCCCACUGCCAGCGGCUAdTdT | 1362 | UAGCCGCUGGCAGUGGGCAdTdT | 1546 | UGCCCACUGCCAGCGGCUG | 1730 |
| AD-70702 | CGGCUGGCCAGCCAGGCCUdTdT | 1363 | AGGCCUGGCUGGCCAGCCGdTdT | 1547 | CGGCUGGCCAGCCAGGCCU | 1731 |
| AD-70703 | AGCCAGGCCUGCCGCACCAdTdT | 1364 | UGGUGCGGCAGGCCUGGCUdTdT | 1548 | AGCCAGGCCUGCCGCACCA | 1732 |
| AD-70704 | CGCACCAACCCGUGCCUCAdTdT | 1365 | UGAGGCACGGGUUGGUGCGdTdT | 1549 | CGCACCAACCCGUGCCUCC | 1733 |
| AD-70705 | UGCCUCCAUGGGGGUCGCUdTdT | 1366 | AGCGACCCCCAUGGAGGCAdTdT | 1550 | UGCCUCCAUGGGGGUCGCU | 1734 |
| AD-70706 | GGGGUCGCUGCCUAGAGGUdTdT | 1367 | ACCUCUAGGCAGCGACCCCdTdT | 1551 | GGGGUCGCUGCCUAGAGGU | 1735 |
| AD-70707 | CUAGAGGUGGAGGGCCACAdTdT | 1368 | UGUGGCCCUCCACCUCUAGdTdT | 1552 | CUAGAGGUGGAGGGCCACC | 1736 |
| AD-70708 | AGGGCCACCGCCUGUGCCAdTdT | 1369 | UGGCACAGGCGGUGGCCCUdTdT | 1553 | AGGGCCACCGCCUGUGCCA | 1737 |
| AD-70709 | UGUGCCACUGCCCGGUGGAdTdT | 1370 | UCCACCGGGCAGUGGCACAdTdT | 1554 | UGUGCCACUGCCCGGUGGG | 1738 |
| AD-70710 | CGGUGGGCUACACCGGAGAdTdT | 1371 | UCUCCGGUGUAGCCCACCGdTdT | 1555 | CGGUGGGCUACACCGGAGC | 1739 |
| AD-70711 | ACCGGAGCCUUCUGCGACAdTdT | 1372 | UGUCGCAGAAGGCUCCGGUdTdT | 1556 | ACCGGAGCCUUCUGCGACG | 1740 |
| AD-70712 | UUCUGCGACGUGGACACCAdTdT | 1373 | UGGUGUCCACGUCGCAGAAdTdT | 1557 | UUCUGCGACGUGGACACCA | 1741 |
| AD-70713 | GACACCAAGGCAAGCUGCUdTdT | 1374 | AGCAGCUUGCCUUGGUGUCdTdT | 1558 | GACACCAAGGCAAGCUGCU | 1742 |
| AD-70714 | CAAGCUGCUAUGAUGGCCAdTdT | 1375 | UGGCCAUCAUAGCAGCUUGdTdT | 1559 | CAAGCUGCUAUGAUGGCCG | 1743 |
| AD-70715 | GAUGGCCGCGGGCUCAGCUdTdT | 1376 | AGCUGAGCCCGCGGCCAUCdTdT | 1560 | GAUGGCCGCGGGCUCAGCU | 1744 |
| AD-70716 | UCAGCUACCGCGGCCUGGAdTdT | 1377 | UCCAGGCCGCGGUAGCUGAdTdT | 1561 | UCAGCUACCGCGGCCUGGC | 1745 |
| AD-70717 | CGGCCUGGCCAGGACCACAdTdT | 1378 | UGUGGUCCUGGCCAGGCCGdTdT | 1562 | CGGCCUGGCCAGGACCACG | 1746 |
| AD-70718 | AGGACCACGCUCUCGGGUAdTdT | 1379 | UACCCGAGAGCGUGGUCCUdTdT | 1563 | AGGACCACGCUCUCGGGUG | 1747 |
| AD-70719 | UCGGGUGCGCCCUGUCAGAdTdT | 1380 | UCUGACAGGGCGCACCCGAdTdT | 1564 | UCGGGUGCGCCCUGUCAGC | 1748 |
| AD-70720 | CUGUCAGCCGUGGGCCUCAdTdT | 1381 | UGAGGCCCACGGCUGACAGdTdT | 1565 | CUGUCAGCCGUGGGCCUCG | 1749 |
| AD-70721 | UGGGCCUCGGAGGCCACCUdTdT | 1382 | AGGUGGCCUCCGAGGCCCAdTdT | 1566 | UGGGCCUCGGAGGCCACCU | 1750 |
| AD-70722 | CCACCUACCGGAACGUGAAdTdT | 1383 | UUCACGUUCCGGUAGGUGGdTdT | 1567 | CCACCUACCGGAACGUGAC | 1751 |
| AD-70723 | AACGUGACUGCCGAGCAAAdTdT | 1384 | UUUGCUCGGCAGUCACGUUdTdT | 1568 | AACGUGACUGCCGAGCAAG | 1752 |
| AD-70724 | CGAGCAAGCGCGGAACUGAdTdT | 1385 | UCAGUUCCGCGCUUGCUCGdTdT | 1569 | CGAGCAAGCGCGGAACUGG | 1753 |
| AD-70725 | CGGAACUGGGGACUGGGCAdTdT | 1386 | UGCCCAGUCCCCAGUUCCGdTdT | 1570 | CGGAACUGGGGACUGGGCG | 1754 |
| AD-70726 | GACUGGGCGGCCACGCCUUdTdT | 1387 | AAGGCGUGGCCGCCCAGUCdTdT | 1571 | GACUGGGCGGCCACGCCUU | 1755 |
| AD-70727 | ACGCCUUCUGCCGGAACCAdTdT | 1388 | UGGUUCCGGCAGAAGGCGUdTdT | 1572 | ACGCCUUCUGCCGGAACCC | 1756 |
| AD-70728 | CGGAACCCGGACAACGACAdTdT | 1389 | UGUCGUUGUCCGGGUUCCGdTdT | 1573 | CGGAACCCGGACAACGACA | 1757 |
| AD-70729 | AACGACAUCCGCCCGUGGUdTdT | 1390 | ACCACGGGCGGAUGUCGUUdTdT | 1574 | AACGACAUCCGCCCGUGGU | 1758 |
| AD-70730 | GCCCGUGGUGCUUCGUGCUdTdT | 1391 | AGCACGAAGCACCACGGGCdTdT | 1575 | GCCCGUGGUGCUUCGUGCU | 1759 |
| AD-70731 | UUCGUGCUGAACCGCGACAdTdT | 1392 | UGUCGCGGUUCAGCACGAAdTdT | 1576 | UUCGUGCUGAACCGCGACC | 1760 |
| AD-70732 | ACCGCGACCGGCUGAGCUAdTdT | 1393 | UAGCUCAGCCGGUCGCGGUdTdT | 1577 | ACCGCGACCGGCUGAGCUG | 1761 |
| AD-70733 | CUGAGCUGGGAGUACUGCAdTdT | 1394 | UGCAGUACUCCCAGCUCAGdTdT | 1578 | CUGAGCUGGGAGUACUGCG | 1762 |
| AD-70734 | UACUGCGACCUGGCACAGUdTdT | 1395 | ACUGUGCCAGGUCGCAGUAdTdT | 1579 | UACUGCGACCUGGCACAGU | 1763 |
| AD-70735 | UGGCACAGUGCCAGACCCAdTdT | 1396 | UGGGUCUGGCACUGUGCCAdTdT | 1580 | UGGCACAGUGCCAGACCCC | 1764 |
| AD-70736 | AGACCCCAACCCAGGCGGAdTdT | 1397 | UCCGCCUGGGUUGGGGUCUdTdT | 1581 | AGACCCCAACCCAGGCGGC | 1765 |
| AD-70737 | AGGCGGCGCCUCCGACCCAdTdT | 1398 | UGGGUCGGAGGCGCCGCCUdTdT | 1582 | AGGCGGCGCCUCCGACCCC | 1766 |
| AD-70738 | UCCGACCCCGGUGUCCCCUdTdT | 1399 | AGGGGACACCGGGGUCGGAdTdT | 1583 | UCCGACCCCGGUGUCCCCU | 1767 |
| AD-70739 | UGUCCCCUAGGCUUCAUGUdTdT | 1400 | ACAUGAAGCCUAGGGGACAdTdT | 1584 | UGUCCCCUAGGCUUCAUGU | 1768 |
| AD-70740 | UUCAUGUCCCACUCAUGCAdTdT | 1401 | UGCAUGAGUGGGACAUGAAdTdT | 1585 | UUCAUGUCCCACUCAUGCC | 1769 |
| AD-70741 | ACUCAUGCCCGCGCAGCCAdTdT | 1402 | UGGCUGCGCGGGCAUGAGUdTdT | 1586 | ACUCAUGCCCGCGCAGCCG | 1770 |
| AD-70742 | CGCAGCCGGCACCGCCGAAdTdT | 1403 | UUCGGCGGUGCCGGCUGCGdTdT | 1587 | CGCAGCCGGCACCGCCGAA | 1771 |
| AD-70743 | ACCGCCGAAGCCUCAGCCAdTdT | 1404 | UGGCUGAGGCUUCGGCGGUdTdT | 1588 | ACCGCCGAAGCCUCAGCCC | 1772 |
| AD-70744 | UCAGCCCACGACCCGGACAdTdT | 1405 | UGUCCGGGUCGUGGGCUGAdTdT | 1589 | UCAGCCCACGACCCGGACC | 1773 |
| AD-70745 | ACCCGGACCCCGCCUCAGUdTdT | 1406 | ACUGAGGCGGGGUCCGGGUdTdT | 1590 | ACCCGGACCCCGCCUCAGU | 1774 |
| AD-70562 | CCUCAGUCCCAGACCCCGAdTdT | 1407 | UCGGGGUCUGGGACUGAGGdTdT | 1591 | CCUCAGUCCCAGACCCCGG | 1775 |
| AD-70563 | AGACCCCGGGAGCCUUGCAdTdT | 1408 | UGCAAGGCUCCCGGGGUCUdTdT | 1592 | AGACCCCGGGAGCCUUGCC | 1776 |
| AD-70564 | CCUUGCCGGCGAAGCGGGAdTdT | 1409 | UCCCGCUUCGCCGGCAAGGdTdT | 1593 | CCUUGCCGGCGAAGCGGGA | 1777 |
| AD-70565 | AAGCGGGAGCAGCCGCCUUdTdT | 1410 | AAGGCGGCUGCUCCCGCUUdTdT | 1594 | AAGCGGGAGCAGCCGCCUU | 1778 |
| AD-70566 | AGCCGCCUUCCCUGACCAAdTdT | 1411 | UUGGUCAGGGAAGGCGGCUdTdT | 1595 | AGCCGCCUUCCCUGACCAG | 1779 |
| AD-70567 | UGACCAGGAACGGCCCACUdTdT | 1412 | AGUGGGCCGUUCCUGGUCAdTdT | 1596 | UGACCAGGAACGGCCCACU | 1780 |
| AD-70568 | CGGCCCACUGAGCUGCGGAdTdT | 1413 | UCCGCAGCUCAGUGGGCCGdTdT | 1597 | CGGCCCACUGAGCUGCGGG | 1781 |
| AD-70569 | UGCGGGCAGCGGCUCCGCAdTdT | 1414 | UGCGGAGCCGCUGCCCGCAdTdT | 1598 | UGCGGGCAGCGGCUCCGCA | 1782 |
| AD-70570 | CGGCUCCGCAAGAGUCUGUdTdT | 1415 | ACAGACUCUUGCGGAGCCGdTdT | 1599 | CGGCUCCGCAAGAGUCUGU | 1783 |
| AD-70571 | AGUCUGUCUUCGAUGACCAdTdT | 1416 | UGGUCAUCGAAGACAGACUdTdT | 1600 | AGUCUGUCUUCGAUGACCC | 1784 |
| AD-70572 | CGAUGACCCGCGUCGUUGAdTdT | 1417 | UCAACGACGCGGGUCAUCGdTdT | 1601 | CGAUGACCCGCGUCGUUGG | 1785 |
| AD-70573 | UCGUUGGCGGGCUGGUGGAdTdT | 1418 | UCCACCAGCCCGCCAACGAdTdT | 1602 | UCGUUGGCGGGCUGGUGGC | 1786 |
| AD-70574 | UGGUGGCGCUACGCGGGGAdTdT | 1419 | UCCCCGCGUAGCGCCACCAdTdT | 1603 | UGGUGGCGCUACGCGGGGC | 1787 |
| AD-70575 | UACGCGGGGCGCACCCCUAdTdT | 1420 | UAGGGGUGCGCCCCGCGUAdTdT | 1604 | UACGCGGGGCGCACCCCUA | 1788 |
| AD-70576 | ACCCCUACAUCGCCGCGCUdTdT | 1421 | AGCGCGGCGAUGUAGGGGUdTdT | 1605 | ACCCCUACAUCGCCGCGCU | 1789 |
| AD-70577 | GCCGCGCUGUACUGGGGCAdTdT | 1422 | UGCCCCAGUACAGCGCGGCdTdT | 1606 | GCCGCGCUGUACUGGGGCC | 1790 |
| AD-70578 | CUGGGGCCACAGUUUCUGAdTdT | 1423 | UCAGAAACUGUGGCCCCAGdTdT | 1607 | CUGGGGCCACAGUUUCUGC | 1791 |
| AD-70579 | UUUCUGCGCCGGCAGCCUAdTdT | 1424 | UAGGCUGCCGGCGCAGAAAdTdT | 1608 | UUUCUGCGCCGGCAGCCUC | 1792 |
| AD-70580 | CGGCAGCCUCAUCGCCCCAdTdT | 1425 | UGGGGCGAUGAGGCUGCCGdTdT | 1609 | CGGCAGCCUCAUCGCCCCC | 1793 |
| AD-70581 | UCGCCCCCUGCUGGGUGCUdTdT | 1426 | AGCACCCAGCAGGGGGCGAdTdT | 1610 | UCGCCCCCUGCUGGGUGCU | 1794 |
| AD-70582 | UGGGUGCUGACGGCCGCUAdTdT | 1427 | UAGCGGCCGUCAGCACCCAdTdT | 1611 | UGGGUGCUGACGGCCGCUC | 1795 |
| AD-70583 | GCCGCUCACUGCCUGCAGAdTdT | 1428 | UCUGCAGGCAGUGAGCGGCdTdT | 1612 | GCCGCUCACUGCCUGCAGG | 1796 |
| AD-70584 | CUGCAGGACCGGCCCGCAAdTdT | 1429 | UUGCGGGCCGGUCCUGCAGdTdT | 1613 | CUGCAGGACCGGCCCGCAC | 1797 |
| AD-70585 | GGCCCGCACCCGAGGAUCUdTdT | 1430 | AGAUCCUCGGGUGCGGGCCdTdT | 1614 | GGCCCGCACCCGAGGAUCU | 1798 |
| AD-70586 | CGAGGAUCUGACGGUGGUAdTdT | 1431 | UACCACCGUCAGAUCCUCGdTdT | 1615 | CGAGGAUCUGACGGUGGUG | 1799 |
| AD-70587 | GUGGUGCUCGGCCAGGAAAdTdT | 1432 | UUUCCUGGCCGAGCACCACdTdT | 1616 | GUGGUGCUCGGCCAGGAAC | 1800 |
| AD-70588 | GCCAGGAACGCCGUAACCAdTdT | 1433 | UGGUUACGGCGUUCCUGGCdTdT | 1617 | GCCAGGAACGCCGUAACCA | 1801 |
| AD-70589 | CGUAACCACAGCUGUGAGAdTdT | 1434 | UCUCACAGCUGUGGUUACGdTdT | 1618 | CGUAACCACAGCUGUGAGC | 1802 |
| AD-70590 | UGUGAGCCGUGCCAGACGUdTdT | 1435 | ACGUCUGGCACGGCUCACAdTdT | 1619 | UGUGAGCCGUGCCAGACGU | 1803 |
| AD-70591 | UGCCAGACGUUGGCCGUGAdTdT | 1436 | UCACGGCCAACGUCUGGCAdTdT | 1620 | UGCCAGACGUUGGCCGUGC | 1804 |
| AD-70592 | GCCGUGCGCUCCUACCGCUdTdT | 1437 | AGCGGUAGGAGCGCACGGCdTdT | 1621 | GCCGUGCGCUCCUACCGCU | 1805 |
| AD-70593 | UACCGCUUGCACGAGGCCUdTdT | 1438 | AGGCCUCGUGCAAGCGGUAdTdT | 1622 | UACCGCUUGCACGAGGCCU | 1806 |
| AD-70594 | ACGAGGCCUUCUCGCCCGUdTdT | 1439 | ACGGGCGAGAAGGCCUCGUdTdT | 1623 | ACGAGGCCUUCUCGCCCGU | 1807 |
| AD-70595 | UCGCCCGUCAGCUACCAGAdTdT | 1440 | UCUGGUAGCUGACGGGCGAdTdT | 1624 | UCGCCCGUCAGCUACCAGC | 1808 |
| AD-70596 | CUACCAGCACGACCUGGCUdTdT | 1441 | AGCCAGGUCGUGCUGGUAGdTdT | 1625 | CUACCAGCACGACCUGGCU | 1809 |
| AD-70597 | ACCUGGCUCUGUUGCGCCUdTdT | 1442 | AGGCGCAACAGAGCCAGGUdTdT | 1626 | ACCUGGCUCUGUUGCGCCU | 1810 |
| AD-70598 | UUGCGCCUUCAGGAGGAUAdTdT | 1443 | UAUCCUCCUGAAGGCGCAAdTdT | 1627 | UUGCGCCUUCAGGAGGAUG | 1811 |
| AD-70599 | GAGGAUGCGGACGGCAGCUdTdT | 1444 | AGCUGCCGUCCGCAUCCUCdTdT | 1628 | GAGGAUGCGGACGGCAGCU | 1812 |
| AD-70600 | ACGGCAGCUGCGCGCUCCUdTdT | 1445 | AGGAGCGCGCAGCUGCCGUdTdT | 1629 | ACGGCAGCUGCGCGCUCCU | 1813 |
| AD-70601 | CGCUCCUGUCGCCUUACGUdTdT | 1446 | ACGUAAGGCGACAGGAGCGdTdT | 1630 | CGCUCCUGUCGCCUUACGU | 1814 |
| AD-70602 | CCUUACGUUCAGCCGGUGUdTdT | 1447 | ACACCGGCUGAACGUAAGGdTdT | 1631 | CCUUACGUUCAGCCGGUGU | 1815 |
| AD-70603 | AGCCGGUGUGCCUGCCAAAdTdT | 1448 | UUUGGCAGGCACACCGGCUdTdT | 1632 | AGCCGGUGUGCCUGCCAAG | 1816 |
| AD-70604 | UGCCAAGCGGCGCCGCGCAdTdT | 1449 | UGCGCGGCGCCGCUUGGCAdTdT | 1633 | UGCCAAGCGGCGCCGCGCG | 1817 |
| AD-70605 | GCGCCGCGCGACCCUCCGAdTdT | 1450 | UCGGAGGGUCGCGCGGCGCdTdT | 1634 | GCGCCGCGCGACCCUCCGA | 1818 |
| AD-70606 | CCCUCCGAGACCACGCUCUdTdT | 1451 | AGAGCGUGGUCUCGGAGGGdTdT | 1635 | CCCUCCGAGACCACGCUCU | 1819 |
| AD-70607 | CGCUCUGCCAGGUGGCCGAdTdT | 1452 | UCGGCCACCUGGCAGAGCGdTdT | 1636 | CGCUCUGCCAGGUGGCCGG | 1820 |
| AD-70608 | AGGUGGCCGGCUGGGGCCAdTdT | 1453 | UGGCCCCAGCCGGCCACCUdTdT | 1637 | AGGUGGCCGGCUGGGGCCA | 1821 |
| AD-70609 | UGGGGCCACCAGUUCGAGAdTdT | 1454 | UCUCGAACUGGUGGCCCCAdTdT | 1638 | UGGGGCCACCAGUUCGAGG | 1822 |
| AD-70610 | UUCGAGGGGGCGGAGGAAUdTdT | 1455 | AUUCCUCCGCCCCCUCGAAdTdT | 1639 | UUCGAGGGGGCGGAGGAAU | 1823 |
| AD-70611 | CGGAGGAAUAUGCCAGCUUdTdT | 1456 | AAGCUGGCAUAUUCCUCCGdTdT | 1640 | CGGAGGAAUAUGCCAGCUU | 1824 |
| AD-70612 | CAGCUUCCUGCAGGAGGCAdTdT | 1457 | UGCCUCCUGCAGGAAGCUGdTdT | 1641 | CAGCUUCCUGCAGGAGGCG | 1825 |
| AD-70613 | AGGAGGCGCAGGUACCGUUdTdT | 1458 | AACGGUACCUGCGCCUCCUdTdT | 1642 | AGGAGGCGCAGGUACCGUU | 1826 |
| AD-70614 | AGGUACCGUUCCUCUCCCUdTdT | 1459 | AGGGAGAGGAACGGUACCUdTdT | 1643 | AGGUACCGUUCCUCUCCCU | 1827 |
| AD-70615 | CUCUCCCUGGAGCGCUGCUdTdT | 1460 | AGCAGCGCUCCAGGGAGAGdTdT | 1644 | CUCUCCCUGGAGCGCUGCU | 1828 |
| AD-70616 | CGCUGCUCAGCCCCGGACAdTdT | 1461 | UGUCCGGGGCUGAGCAGCGdTdT | 1645 | CGCUGCUCAGCCCCGGACG | 1829 |
| AD-70617 | CCGGACGUGCACGGAUCCUdTdT | 1462 | AGGAUCCGUGCACGUCCGGdTdT | 1646 | CCGGACGUGCACGGAUCCU | 1830 |
| AD-70618 | CGGAUCCUCCAUCCUCCCAdTdT | 1463 | UGGGAGGAUGGAGGAUCCGdTdT | 1647 | CGGAUCCUCCAUCCUCCCC | 1831 |
| AD-70619 | CAUCCUCCCCGGCAUGCUAdTdT | 1464 | UAGCAUGCCGGGGAGGAUGdTdT | 1648 | CAUCCUCCCCGGCAUGCUC | 1832 |
| AD-70620 | CAUGCUCUGCGCAGGGUUAdTdT | 1465 | UAACCCUGCGCAGAGCAUGdTdT | 1649 | CAUGCUCUGCGCAGGGUUC | 1833 |
| AD-70621 | AGGGUUCCUCGAGGGCGGAdTdT | 1466 | UCCGCCCUCGAGGAACCCUdTdT | 1650 | AGGGUUCCUCGAGGGCGGC | 1834 |
| AD-70622 | GAGGGCGGCACCGAUGCGUdTdT | 1467 | ACGCAUCGGUGCCGCCCUCdTdT | 1651 | GAGGGCGGCACCGAUGCGU | 1835 |
| AD-70623 | GAUGCGUGCCAGGGUGAUUdTdT | 1468 | AAUCACCCUGGCACGCAUCdTdT | 1652 | GAUGCGUGCCAGGGUGAUU | 1836 |
| AD-70624 | AGGGUGAUUCCGGAGGCCAdTdT | 1469 | UGGCCUCCGGAAUCACCCUdTdT | 1653 | AGGGUGAUUCCGGAGGCCC | 1837 |
| AD-70625 | CGGAGGCCCGCUGGUGUGUdTdT | 1470 | ACACACCAGCGGGCCUCCGdTdT | 1654 | CGGAGGCCCGCUGGUGUGU | 1838 |
| AD-70626 | GGUGUGUGAGGACCAAGCUdTdT | 1471 | AGCUUGGUCCUCACACACCdTdT | 1655 | GGUGUGUGAGGACCAAGCU | 1839 |
| AD-70627 | CCAAGCUGCAGAGCGCCGAdTdT | 1472 | UCGGCGCUCUGCAGCUUGGdTdT | 1656 | CCAAGCUGCAGAGCGCCGG | 1840 |
| AD-70628 | AGAGCGCCGGCUCACCCUAdTdT | 1473 | UAGGGUGAGCCGGCGCUCUdTdT | 1657 | AGAGCGCCGGCUCACCCUG | 1841 |
| AD-70629 | UCACCCUGCAAGGCAUCAUdTdT | 1474 | AUGAUGCCUUGCAGGGUGAdTdT | 1658 | UCACCCUGCAAGGCAUCAU | 1842 |
| AD-70630 | GGCAUCAUCAGCUGGGGAUdTdT | 1475 | AUCCCCAGCUGAUGAUGCCdTdT | 1659 | GGCAUCAUCAGCUGGGGAU | 1843 |
| AD-70631 | CUGGGGAUCGGGCUGUGGUdTdT | 1476 | ACCACAGCCCGAUCCCCAGdTdT | 1660 | CUGGGGAUCGGGCUGUGGU | 1844 |
| AD-70632 | UGUGGUGACCGCAACAAGAdTdT | 1477 | UCUUGUUGCGGUCACCACAdTdT | 1661 | UGUGGUGACCGCAACAAGC | 1845 |
| AD-70633 | CAACAAGCCAGGCGUCUAAdTdT | 1478 | UUAGACGCCUGGCUUGUUGdTdT | 1662 | CAACAAGCCAGGCGUCUAC | 1846 |
| AD-70634 | AGGCGUCUACACCGAUGUAdTdT | 1479 | UACAUCGGUGUAGACGCCUdTdT | 1663 | AGGCGUCUACACCGAUGUG | 1847 |
| AD-70635 | GAUGUGGCCUACUACCUGAdTdT | 1480 | UCAGGUAGUAGGCCACAUCdTdT | 1664 | GAUGUGGCCUACUACCUGG | 1848 |
| AD-70636 | UACUACCUGGCCUGGAUCAdTdT | 1481 | UGAUCCAGGCCAGGUAGUAdTdT | 1665 | UACUACCUGGCCUGGAUCC | 1849 |
| AD-70637 | CUGGAUCCGGGAGCACACAdTdT | 1482 | UGUGUGCUCCCGGAUCCAGdTdT | 1666 | CUGGAUCCGGGAGCACACC | 1850 |
| AD-70638 | AGCACACCGUUUCCUGAUUdTdT | 1483 | AAUCAGGAAACGGUGUGCUdTdT | 1667 | AGCACACCGUUUCCUGAUU | 1851 |
| AD-70639 | UCCUGAUUGCUCAGGGACUdTdT | 1484 | AGUCCCUGAGCAAUCAGGAdTdT | 1668 | UCCUGAUUGCUCAGGGACU | 1852 |
| AD-70640 | CAGGGACUCAUCUUUCCCUdTdT | 1485 | AGGGAAAGAUGAGUCCCUGdTdT | 1669 | CAGGGACUCAUCUUUCCCU | 1853 |
| AD-70641 | UUUCCCUCCUUGGUGAUUAdTdT | 1486 | UAAUCACCAAGGAGGGAAAdTdT | 1670 | UUUCCCUCCUUGGUGAUUC | 1854 |
| AD-70642 | UGGUGAUUCCGCAGUGAGAdTdT | 1487 | UCUCACUGCGGAAUCACCAdTdT | 1671 | UGGUGAUUCCGCAGUGAGA | 1855 |
| AD-70643 | AGUGAGAGAGUGGCUGGGAdTdT | 1488 | UCCCAGCCACUCUCUCACUdTdT | 1672 | AGUGAGAGAGUGGCUGGGG | 1856 |
| AD-70644 | GCUGGGGCAUGGAAGGCAAdTdT | 1489 | UUGCCUUCCAUGCCCCAGCdTdT | 1673 | GCUGGGGCAUGGAAGGCAA | 1857 |
| AD-70645 | UGGAAGGCAAGAUUGUGUAdTdT | 1490 | UACACAAUCUUGCCUUCCAdTdT | 1674 | UGGAAGGCAAGAUUGUGUC | 1858 |
| AD-70646 | UUGUGUCCCAUUCCCCCAAdTdT | 1491 | UUGGGGGAAUGGGACACAAdTdT | 1675 | UUGUGUCCCAUUCCCCCAG | 1859 |
| AD-70647 | UCCCCCAGUGCGGCCAGCUdTdT | 1492 | AGCUGGCCGCACUGGGGGAdTdT | 1676 | UCCCCCAGUGCGGCCAGCU | 1860 |
| AD-70648 | GCCAGCUCCGCGCCAGGAUdTdT | 1493 | AUCCUGGCGCGGAGCUGGCdTdT | 1677 | GCCAGCUCCGCGCCAGGAU | 1861 |
| AD-70649 | GCCAGGAUGGCGCAGGAAAdTdT | 1494 | UUUCCUGCGCCAUCCUGGCdTdT | 1678 | GCCAGGAUGGCGCAGGAAC | 1862 |
| AD-70650 | GCAGGAACUCAAUAAAGUAdTdT | 1495 | UACUUUAUUGAGUUCCUGCdTdT | 1679 | GCAGGAACUCAAUAAAGUG | 1863 |
| AD-70651 | AAUAAAGUGCUUUGAAAAUdTdT | 1496 | AUUUUCAAAGCACUUUAUUdTdT | 1680 | AAUAAAGUGCUUUGAAAAU | 1864 |
| AD-70652 | UUGAAAAUGCUGAGAAAAAdTdT | 1497 | UUUUUCUCAGCAUUUUCAAdTdT | 1681 | UUGAAAAUGCUGAGAAAAA | 1865 |

TABLE 13
F12 Single Dose Screen in Hep3b Cells

| Duplex Name | AVG | STDEV |
|---|---|---|
| AD-70653 | 75.05 | 21.99 |
| AD-70654 | 59.86 | 17.07 |
| AD-70655 | 49.58 | 5.13 |
| AD-70656 | 42.85 | 9.76 |
| AD-70657 | 40.2 | 6.21 |
| AD-70658 | 52.43 | 13.02 |
| AD-70659 | 34.67 | 3.33 |
| AD-70660 | 33.59 | 8.28 |
| AD-70661 | 53.13 | 11.32 |
| AD-70662 | 61.89 | 7.76 |
| AD-70663 | 48.43 | 6.92 |
| AD-70664 | 34.42 | 4.01 |
| AD-70665 | 33.22 | 4.21 |
| AD-70666 | 33.44 | 5.89 |
| AD-70667 | 47.6 | 10.96 |
| AD-70668 | 125.01 | 38.32 |
| AD-70669 | 64.78 | 12.71 |
| AD-70670 | 57.49 | 5.4 |
| AD-70671 | 30.06 | 7.8 |
| AD-70672 | 54.95 | 2.39 |
| AD-70673 | 79.79 | 10.29 |
| AD-70674 | 88.3 | 12.07 |
| AD-70675 | 55.83 | 14.88 |
| AD-70676 | 61.99 | 12.96 |
| AD-70677 | 50.27 | 9.84 |
| AD-70678 | 65.84 | 10.37 |
| AD-70679 | 51.1 | 8.97 |
| AD-70680 | 64.71 | 10.54 |
| AD-70681 | 41.02 | 6.75 |
| AD-70682 | 60.65 | 9.01 |
| AD-70683 | 96.74 | 6.29 |
| AD-70684 | 71.16 | 13.22 |
| AD-70685 | 99.97 | 12.48 |
| AD-70686 | 45.51 | 6.21 |
| AD-70687 | 68.37 | 5.36 |
| AD-70688 | 65.68 | 6.4 |
| AD-70689 | 63.41 | 5.72 |
| AD-70690 | 54.1 | 7.23 |
| AD-70691 | 43.79 | 11.91 |
| AD-70692 | 51.36 | 8.64 |
| AD-70693 | 43.25 | 7.81 |
| AD-70694 | 51.13 | 4.52 |
| AD-70695 | 47.38 | 4.76 |
| AD-70696 | 63.08 | 3.96 |
| AD-70697 | 49.53 | 6.44 |
| AD-70698 | 56.12 | 8.22 |
| AD-70699 | 53.68 | 4.62 |
| AD-70700 | 68.45 | 12.64 |
| AD-70701 | 94.45 | 11.32 |
| AD-70702 | 70.82 | 8.36 |
| AD-70703 | 93.79 | 7.87 |
| AD-70704 | 35.84 | 4.09 |
| AD-70705 | 87.79 | 5.74 |
| AD-70706 | 59.21 | 9.08 |
| AD-70707 | 64.22 | 10.1 |
| AD-70708 | 49.55 | 3 |
| AD-70709 | 87.37 | 7.17 |
| AD-70710 | 76.54 | 11.55 |
| AD-70711 | 62.4 | 4.69 |
| AD-70712 | 80.45 | 8.12 |
| AD-70713 | 76.68 | 16.28 |
| AD-70714 | 61.92 | 15.07 |
| AD-70715 | 85.76 | 8.24 |
| AD-70716 | 97.67 | 8.1 |
| AD-70717 | 70.83 | 2.72 |
| AD-70718 | 50.19 | 9.69 |
| AD-70719 | 77.23 | 4.82 |
| AD-70720 | 69.02 | 6.52 |
| AD-70721 | 84.91 | 12.03 |
| AD-70722 | 42.64 | 6.44 |
| AD-70723 | 56.77 | 6.73 |
| AD-70724 | 50.28 | 7.37 |
| AD-70725 | 73.06 | 14.77 |
| AD-70726 | 69.29 | 8.43 |
| AD-70727 | 68.98 | 5.88 |
| AD-70728 | 59.51 | 5.26 |
| AD-70729 | 77.31 | 11.18 |
| AD-70730 | 48.22 | 9.04 |
| AD-70731 | 63.52 | 3.78 |
| AD-70732 | 60.89 | 6.26 |
| AD-70733 | 55.56 | 13.83 |
| AD-70734 | 110.37 | 7.09 |
| AD-70735 | 70.96 | 1.41 |
| AD-70736 | 72.71 | 4.28 |
| AD-70737 | 66.94 | 4.75 |
| AD-70738 | 104.61 | 9.8 |
| AD-70739 | 87.48 | 8.44 |
| AD-70740 | 69.08 | 9.31 |
| AD-70741 | 67.82 | 3.49 |
| AD-70742 | 92.93 | 14.66 |
| AD-70743 | 59.32 | 9.95 |
| AD-70744 | 81.97 | 6.05 |
| AD-70745 | 54.96 | 7.81 |
| AD-70562 | 46.21 | 8.44 |
| AD-70563 | 44.88 | 5.69 |
| AD-70564 | 67.82 | 20.32 |
| AD-70565 | 52.32 | 12.39 |
| AD-70566 | 53.22 | 10.43 |
| AD-70567 | 46.28 | 10.21 |
| AD-70568 | 41.84 | 3.91 |
| AD-70569 | 46.27 | 10.51 |
| AD-70570 | 37.31 | 7.6 |
| AD-70571 | 55.84 | 13.93 |
| AD-70572 | 64.38 | 6.03 |
| AD-70573 | 75.03 | 17.72 |
| AD-70574 | 61.2 | 7.6 |
| AD-70575 | 55.54 | 18.99 |
| AD-70576 | 48.67 | 7.52 |
| AD-70577 | 34.12 | 10.23 |
| AD-70578 | 56.62 | 6.22 |
| AD-70579 | 58.22 | 17.32 |
| AD-70580 | 64.99 | 8.66 |
| AD-70581 | 86.55 | 15.76 |
| AD-70582 | 72.76 | 11.98 |
| AD-70583 | 47.99 | 20.51 |
| AD-70584 | 54 | 14.12 |
| AD-70585 | 43.72 | 6.69 |
| AD-70586 | 55.96 | 12.05 |
| AD-70587 | 64.82 | 18.43 |
| AD-70588 | 66.06 | 13.08 |
| AD-70589 | 56.65 | 10.27 |
| AD-70590 | 77.82 | 4.75 |
| AD-70591 | 68.65 | 9.93 |
| AD-70592 | 37.1 | 9.84 |
| AD-70593 | 50.14 | 17.24 |
| AD-70594 | 50.16 | 13.61 |
| AD-70595 | 60.63 | 13.54 |
| AD-70596 | 80.78 | 12.29 |
| AD-70597 | 60.74 | 21.94 |
| AD-70598 | 70.51 | 8.48 |
| AD-70599 | 67.75 | 7.59 |
| AD-70600 | 68.09 | 31.51 |
| AD-70601 | 53.28 | 21.16 |
| AD-70602 | 44.03 | 10.56 |
| AD-70603 | 87.08 | 40.51 |
| AD-70604 | 69.39 | 9.62 |
| AD-70605 | 86.92 | 27.74 |
| AD-70606 | 62.19 | 7.28 |
| AD-70607 | 67.55 | 19.57 |
| AD-70608 | 98.46 | 10.23 |
| AD-70609 | 77.67 | 10.72 |
| AD-70610 | 108.45 | 21.97 |
| AD-70611 | 73.02 | 19.12 |
| AD-70612 | 97.49 | 26.26 |
| AD-70613 | 65.22 | 19.24 |
| AD-70614 | 96.69 | 21.51 |
| AD-70615 | 76.53 | 7.96 |
| AD-70616 | 69.73 | 12.06 |
| AD-70617 | 58.38 | 10.85 |
| AD-70618 | 73.89 | 22.5 |
| AD-70619 | 85.32 | 25.92 |
| AD-70620 | 72.03 | 33.04 |
| AD-70621 | 83.22 | 24.59 |
| AD-70622 | 108.98 | 14.93 |
| AD-70623 | 71.28 | 32.49 |
| AD-70624 | 67.8 | 25.27 |
| AD-70625 | 52.08 | 10.91 |
| AD-70626 | 40.94 | 13.75 |
| AD-70627 | 33.55 | 3.35 |
| AD-70628 | 52.37 | 10.46 |
| AD-70629 | 53.46 | 4.07 |
| AD-70630 | 47 | 8.42 |
| AD-70631 | 64.51 | 42.23 |
| AD-70632 | 30.66 | 4.32 |
| AD-70633 | 33.64 | 12.21 |
| AD-70634 | 65.42 | 6.92 |
| AD-70635 | 45.84 | 6.76 |
| AD-70636 | 47.83 | 6.63 |
| AD-70637 | 64.39 | 8.42 |
| AD-70638 | 38.91 | 8.35 |
| AD-70639 | 40.87 | 7.79 |
| AD-70640 | 50.87 | 13.34 |
| AD-70641 | 49.64 | 5.85 |
| AD-70642 | 44.04 | 8.02 |
| AD-70643 | 61.04 | 11.12 |
| AD-70644 | 50.03 | 9.07 |
| AD-70645 | 67.35 | 28.98 |
| AD-70646 | 50.93 | 6 |
| AD-70647 | 83.29 | 5.96 |
| AD-70648 | 53.57 | 15.44 |
| AD-70649 | 46.35 | 8.99 |
| AD-70650 | 52.06 | 7.83 |
| AD-70651 | 64.65 | 9.04 |
| AD-70652 | 100.8 | 9.21 |

### Example 6. In Vivo F12 Silencing in Mustard Oil-Induced Vascular Permeability Mouse Model

[0637] As discussed above, AD-67244 was the most efficacious agent targeting an F12 gene that was tested, resulting in robust, dose-dependent reduction of F12 mRNA and plasma F12 protein in wild-type mice, and normalization of vascular permeability in a bradykinin-induced vascular leakage mouse model of HAE (the ACE-inhibitor-induced mouse model).

[0638] The in vivo efficacy of AD-67244 was also assessed in a second mouse model of HAE. In particular, the ability of AD-67244 to rescue mustard oil-induced vascular permeability in C1-INH deficient mice was determined by subcutaneously administering CD-1 female mice (n=10/group) a single 3 mg/kg, 0.5 mg/kg, or 0.1 mg/kg dose of AD-67244 in combination with a single 10 mg/kg dose of a double stranded RNA agent targeting C1-INH at day −7. On Day 0, Evans Blue dye (30 mg/kg) was injected into the tail vein of the animals and a 5% solution of mustard oil was topically applied to the right ear of each animal (the left ear was left untreated and served as a control). Thirty minutes later, the animals were sacrificed, each ear was collected for dye extravasation to determine vascular permeability, and livers were collected for F12 and C1-INH mRNA measurements.

[0639] As shown in FIG. 3A, administration of a single 3 mg/kg, 0.5 mg/kg, or 0.1 mg/kg dose of AD-67244 normalized vascular permeability in these mice and, as shown in FIG. 3B, this administration resulted in robust, dose-dependent reduction of F12 mRNA in the livers of these animals. The level of C1-INH in the livers of these animals was less than 0.01% of the level of C1-INH in the livers of the control group administered. These data demonstrate that AD-67244 can mitigate excess bradykinin stimulation.

### Example 7. In Vivo F12 Silencing in Non-Human Primates

[0640] To determine the efficacy of AD-67244 in non-human primates, female Cynomolgus monkeys (n=3 per group) were subcutaneously administered a single 3 mg/kg, 1 mg/kg, 0.3 mg/kg, or 0.1 mg/kg dose of AD-67244. The level of Cynomolgus F12 μlasma protein levels was measured by ELISA at days −5, −3, −1, 3, 7, 10, 14, 21, 28, 35, 42, 49, 56, 63, 70, 77, 84, 91, 98, 112, 126, and 140 post-dose. FIG. 4 demonstrates that administration of a single 0.3 mg/kg dose of AD-67244 resulted in greater than 85% reduction in F12 protein. FIG. 11 also demonstrates that this reduction in F12 protein was durable with greater than 70% and 50% reduction at 2 and 3 months post-dose, respectively.

### Example 8. Effect of 5′ Modification of AD-67244 on Potency in Mice

[0641] The effect of modifying the 5′ antisense phosphate of AD-67244 with a vinylphosphate (VP) on the potency of the agent was determined in mice. Wild-type mice (n=3/group) were administered a single 0.5 mg/kg dose of either AD-67244 (sense: 5′-asascucaAfuAfAfAfgugcuuugaa-3′ (SEQ ID NO: 1866); antisense: 5′-usUfscaaAfgCfAfcuuuAfuUfgaguususc-3′ (SEQ ID NO: 1867); ALN-F12) or AD-74841 (sense: 5′-asascucaAfuAfAfAfgugcuuugaa-3′ (SEQ ID NO: 1868); antisense: 5′-VP-usUfscaaAfgCfAfcuuuAfuUfgaguususc-3′ (SEQ ID NO: 1869); ALN-F12-VP). The plasma level of F12 protein was determined by ELISA at days 0, 3, 7, 15, and 21 post-dose. FIG. 4 demonstrates that 5′ modification of the antisense phosphate group with a vinylphosphate moderately increased the potency of AD-67244.

### Example 9. Synthesis and In Vitro Screening of F12 siRNA Duplexes

[0642] Additional iRNA agents targeting F12, e.g., targeting about nucleotides 2000-2060 of SEQ ID NO:9, were designed, synsthesized, and screened for in vitro efficacy, as described above. A detailed list of the additional unmodified F12 sense and antisense strand sequences is shown in Table 14. A detailed list of the additional modified F12 sense and antisense strand sequences is shown in Table 15. Table 16 provides the results of a single dose screen in Hep3b cells transfected with the indicated additional F12 iRNAs. Data are expressed as percent of mRNA remaining relative to AD-1955.

TABLE 14
F12 Unmodified Sequences

| | | SEQ | | | SEQ | |
|---|---|---|---|---|---|---|
| | | ID | Range in SEQ | | ID | Range in SEQ |
| Duplex Name | Sense Sequence 5′ to 3′ | NO | ID NO: 9 | Antisense Sequence 5′ to 3′ | NO | ID NO: 9 |
| AD-70649.2 | GCCAGGAUGGCGCAGGAAA | 1870 | 2004-2022 | UUUCCUGCGCCAUCCUGGC | 1908 | 2004-2022 |
| AD-75921.1 | CCAGGAUGGCGCAGGAACU | 1871 | 2005-2023 | AGUUCCUGCGCCAUCCUGG | 1909 | 2005-2023 |
| AD-75920.1 | CAGGAUGGCGCAGGAACUA | 1872 | 2006-2024 | UAGUUCCUGCGCCAUCCUG | 1910 | 2006-2024 |
| AD-75919.1 | AGGAUGGCGCAGGAACUCA | 1873 | 2007-2025 | UGAGUUCCUGCGCCAUCCU | 1911 | 2007-2025 |
| AD-75918.1 | GGAUGGCGCAGGAACUCAA | 1874 | 2008-2026 | UUGAGUUCCUGCGCCAUCC | 1912 | 2008-2026 |
| AD-75917.1 | GAUGGCGCAGGAACUCAAU | 1875 | 2009-2027 | AUUGAGUUCCUGCGCCAUC | 1913 | 2009-2027 |
| AD-75916.1 | AUGGCGCAGGAACUCAAUA | 1876 | 2010-2028 | UAUUGAGUUCCUGCGCCAU | 1914 | 2010-2028 |
| AD-75915.1 | UGGCGCAGGAACUCAAUAA | 1877 | 2011-2029 | UUAUUGAGUUCCUGCGCCA | 1915 | 2011-2029 |
| AD-75914.1 | GGCGCAGGAACUCAAUAAA | 1878 | 2012-2030 | UUUAUUGAGUUCCUGCGCC | 1916 | 2012-2030 |
| AD-75913.1 | GCGCAGGAACUCAAUAAAA | 1879 | 2013-2031 | UUUUAUUGAGUUCCUGCGC | 1917 | 2013-2031 |
| AD-75912.1 | CGCAGGAACUCAAUAAAGU | 1880 | 2014-2032 | ACUUUAUUGAGUUCCUGCG | 1918 | 2014-2032 |
| AD-70650.2 | GCAGGAACUCAAUAAAGUA | 1881 | 2015-2033 | UACUUUAUUGAGUUCCUGC | 1919 | 2015-2033 |
| AD-75911.1 | CAGGAACUCAAUAAAGUGA | 1882 | 2016-2034 | UCACUUUAUUGAGUUCCUG | 1920 | 2016-2034 |
| AD-75910.1 | AGGAACUCAAUAAAGUGCU | 1883 | 2017-2035 | AGCACUUUAUUGAGUUCCU | 1921 | 2017-2035 |
| AD-75909.1 | GGAACUCAAUAAAGUGCUU | 1884 | 2018-2036 | AAGCACUUUAUUGAGUUCC | 1922 | 2018-2036 |
| AD-75908.1 | GAACUCAAUAAAGUGCUUU | 1885 | 2019-2037 | AAAGCACUUUAUUGAGUUC | 1923 | 2019-2037 |
| AD-75907.1 | AACUCAAUAAAGUGCUUUA | 1886 | 2020-2038 | UAAAGCACUUUAUUGAGUU | 1924 | 2020-2038 |
| AD-75906.1 | ACUCAAUAAAGUGCUUUGA | 1887 | 2021-2039 | UCAAAGCACUUUAUUGAGU | 1925 | 2021-2039 |
| AD-75922.1 | UCAAUAAAGUGCUUUGAAA | 1888 | 2023-2041 | UUUCAAAGCACUUUAUUGA | 1926 | 2023-2041 |
| AD-75923.1 | CAAUAAAGUGCUUUGAAAA | 1889 | 2024-2042 | UUUUCAAAGCACUUUAUUG | 1927 | 2024-2042 |
| AD-70651.2 | AAUAAAGUGCUUUGAAAAU | 1890 | 2025-2043 | AUUUUCAAAGCACUUUAUU | 1928 | 2025-2043 |
| AD-75924.1 | AUAAAGUGCUUUGAAAAUA | 1891 | 2026-2044 | UAUUUUCAAAGCACUUUAU | 1929 | 2026-2044 |
| AD-75925.1 | UAAAGUGCUUUGAAAAUGA | 1892 | 2027-2045 | UCAUUUUCAAAGCACUUUA | 1930 | 2027-2045 |
| AD-75926.1 | AAAGUGCUUUGAAAAUGCU | 1893 | 2028-2046 | AGCAUUUUCAAAGCACUUU | 1931 | 2028-2046 |
| AD-75927.1 | AAGUGCUUUGAAAAUGCUA | 1894 | 2029-2047 | UAGCAUUUUCAAAGCACUU | 1932 | 2029-2047 |
| AD-75928.1 | AGUGCUUUGAAAAUGCUGA | 1895 | 2030-2048 | UCAGCAUUUUCAAAGCACU | 1933 | 2030-2048 |
| AD-75929.1 | GUGCUUUGAAAAUGCUGAA | 1896 | 2031-2049 | UUCAGCAUUUUCAAAGCAC | 1934 | 2031-2049 |
| AD-75930.1 | UGCUUUGAAAAUGCUGAGA | 1897 | 2032-2050 | UCUCAGCAUUUUCAAAGCA | 1935 | 2032-2050 |
| AD-75931.1 | GCUUUGAAAAUGCUGAGAA | 1898 | 2033-2051 | UUCUCAGCAUUUUCAAAGC | 1936 | 2033-2051 |
| AD-75932.1 | CUUUGAAAAUGCUGAGAAA | 1899 | 2034-2052 | UUUCUCAGCAUUUUCAAAG | 1937 | 2034-2052 |
| AD-75933.1 | UUUGAAAAUGCUGAGAAAA | 1900 | 2035-2053 | UUUUCUCAGCAUUUUCAAA | 1938 | 2035-2053 |
| AD-70652.2 | UUGAAAAUGCUGAGAAAAA | 1901 | 2036-2054 | UUUUUCUCAGCAUUUUCAA | 1939 | 2036-2054 |
| AD-75934.1 | UGAAAAUGCUGAGAAAAAA | 1902 | 2037-2055 | UUUUUUCUCAGCAUUUUCA | 1940 | 2037-2055 |
| AD-75935.1 | GAAAAUGCUGAGAAAAAAA | 1903 | 2038-2056 | UUUUUUUCUCAGCAUUUUC | 1941 | 2038-2056 |
| AD-75936.1 | AAAAUGCUGAGAAAAAAAA | 1904 | 2039-2057 | UUUUUUUUCUCAGCAUUUU | 1942 | 2039-2057 |
| AD-75937.1 | AAAUGCUGAGAAAAAAAAA | 1905 | 2040-2058 | UUUUUUUUUCUCAGCAUUU | 1943 | 2040-2058 |
| AD-75938.1 | AAUGCUGAGAAAAAAAAAA | 1906 | 2041-2059 | UUUUUUUUUUCUCAGCAUU | 1944 | 2041-2059 |
| AD-75939.1 | AUGCUGAGAAAAAAAAAAA | 1907 | 2042-2060 | UUUUUUUUUUUCUCAGCAU | 1945 | 2042-2060 |

TABLE 15
F12 Modified Sequences

| | | SEQ | | SEQ | | SEQ | mRNA target |
|---|---|---|---|---|---|---|---|
| Duplex | | ID | Antisense Sequence | ID | mRNA target sequence | ID | site in SEQ |
| Name | Sense Sequence 5′ to 3′ | NO | 5′ to 3′ | NO | 5′ to 3′ | NO | ID NO: 9 |
| AD-70649 | GCCAGGAUGGCGCAGGAAAdTdT | 1946 | UUUCCUGCGCCAUCCUGGCdTdT | 1984 | GCCAGGAUGGCGCAGGAAC | 2022 | 2004-2022 |
| AD-75921 | CCAGGAUGGCGCAGGAACUdTdT | 1947 | AGUUCCUGCGCCAUCCUGGdTdT | 1985 | CCAGGAUGGCGCAGGAACU | 2023 | 2005-2023 |
| AD-75920 | CAGGAUGGCGCAGGAACUAdTdT | 1948 | UAGUUCCUGCGCCAUCCUGdTdT | 1986 | CAGGAUGGCGCAGGAACUC | 2024 | 2006-2024 |
| AD-75919 | AGGAUGGCGCAGGAACUCAdTdT | 1949 | UGAGUUCCUGCGCCAUCCUdTdT | 1987 | AGGAUGGCGCAGGAACUCA | 2025 | 2007-2025 |
| AD-75918 | GGAUGGCGCAGGAACUCAAdTdT | 1950 | UUGAGUUCCUGCGCCAUCCdTdT | 1988 | GGAUGGCGCAGGAACUCAA | 2026 | 2008-2026 |
| AD-75917 | GAUGGCGCAGGAACUCAAUdTdT | 1951 | AUUGAGUUCCUGCGCCAUCdTdT | 1989 | GAUGGCGCAGGAACUCAAU | 2027 | 2009-2027 |
| AD-75916 | AUGGCGCAGGAACUCAAUAdTdT | 1952 | UAUUGAGUUCCUGCGCCAUdTdT | 1990 | AUGGCGCAGGAACUCAAUA | 2028 | 2010-2028 |
| AD-75915 | UGGCGCAGGAACUCAAUAAdTdT | 1953 | UUAUUGAGUUCCUGCGCCAdTdT | 1991 | UGGCGCAGGAACUCAAUAA | 2029 | 2011-2029 |
| AD-75914 | GGCGCAGGAACUCAAUAAAdTdT | 1954 | UUUAUUGAGUUCCUGCGCCdTdT | 1992 | GGCGCAGGAACUCAAUAAA | 2030 | 2012-2030 |
| AD-75913 | GCGCAGGAACUCAAUAAAAdTdT | 1955 | UUUUAUUGAGUUCCUGCGCdTdT | 1993 | GCGCAGGAACUCAAUAAAG | 2031 | 2013-2031 |
| AD-75912 | CGCAGGAACUCAAUAAAGUdTdT | 1956 | ACUUUAUUGAGUUCCUGCGdTdT | 1994 | CGCAGGAACUCAAUAAAGU | 2032 | 2014-2032 |
| AD-70650 | GCAGGAACUCAAUAAAGUAdTdT | 1957 | UACUUUAUUGAGUUCCUGCdTdT | 1995 | GCAGGAACUCAAUAAAGUG | 2033 | 2015-2033 |
| AD-75911 | CAGGAACUCAAUAAAGUGAdTdT | 1958 | UCACUUUAUUGAGUUCCUGdTdT | 1996 | CAGGAACUCAAUAAAGUGC | 2034 | 2016-2034 |
| AD-75910 | AGGAACUCAAUAAAGUGCUdTdT | 1959 | AGCACUUUAUUGAGUUCCUdTdT | 1997 | AGGAACUCAAUAAAGUGCU | 2035 | 2017-2035 |
| AD-75909 | GGAACUCAAUAAAGUGCUUdTdT | 1960 | AAGCACUUUAUUGAGUUCCdTdT | 1998 | GGAACUCAAUAAAGUGCUU | 2036 | 2018-2036 |
| AD-75908 | GAACUCAAUAAAGUGCUUUdTdT | 1961 | AAAGCACUUUAUUGAGUUCdTdT | 1999 | GAACUCAAUAAAGUGCUUU | 2037 | 2019-2037 |
| AD-75907 | AACUCAAUAAAGUGCUUUAdTdT | 1962 | UAAAGCACUUUAUUGAGUUdTdT | 2000 | AACUCAAUAAAGUGCUUUG | 2038 | 2020-2038 |
| AD-75906 | ACUCAAUAAAGUGCUUUGAdTdT | 1963 | UCAAAGCACUUUAUUGAGUdTdT | 2001 | ACUCAAUAAAGUGCUUUGA | 2039 | 2021-2039 |
| AD-75922 | UCAAUAAAGUGCUUUGAAAdTdT | 1964 | UUUCAAAGCACUUUAUUGAdTdT | 2002 | UCAAUAAAGUGCUUUGAAA | 2040 | 2023-2041 |
| AD-75923 | CAAUAAAGUGCUUUGAAAAdTdT | 1965 | UUUUCAAAGCACUUUAUUGdTdT | 2003 | CAAUAAAGUGCUUUGAAAA | 2041 | 2024-2042 |
| AD-70651 | AAUAAAGUGCUUUGAAAAUdTdT | 1966 | AUUUUCAAAGCACUUUAUUdTdT | 2004 | AAUAAAGUGCUUUGAAAAU | 2042 | 2025-2043 |
| AD-75924 | AUAAAGUGCUUUGAAAAUAdTdT | 1967 | UAUUUUCAAAGCACUUUAUdTdT | 2005 | AUAAAGUGCUUUGAAAAUG | 2043 | 2026-2044 |
| AD-75925 | UAAAGUGCUUUGAAAAUGAdTdT | 1968 | UCAUUUUCAAAGCACUUUAdTdT | 2006 | UAAAGUGCUUUGAAAAUGC | 2044 | 2027-2045 |
| AD-75926 | AAAGUGCUUUGAAAAUGCUdTdT | 1969 | AGCAUUUUCAAAGCACUUUdTdT | 2007 | AAAGUGCUUUGAAAAUGCU | 2045 | 2028-2046 |
| AD-75927 | AAGUGCUUUGAAAAUGCUAdTdT | 1970 | UAGCAUUUUCAAAGCACUUdTdT | 2008 | AAGUGCUUUGAAAAUGCUG | 2046 | 2029-2047 |
| AD-75928 | AGUGCUUUGAAAAUGCUGAdTdT | 1971 | UCAGCAUUUUCAAAGCACUdTdT | 2009 | AGUGCUUUGAAAAUGCUGA | 2047 | 2030-2048 |
| AD-75929 | GUGCUUUGAAAAUGCUGAAdTdT | 1972 | UUCAGCAUUUUCAAAGCACdTdT | 2010 | GUGCUUUGAAAAUGCUGAG | 2048 | 2031-2049 |
| AD-75930 | UGCUUUGAAAAUGCUGAGAdTdT | 1973 | UCUCAGCAUUUUCAAAGCAdTdT | 2011 | UGCUUUGAAAAUGCUGAGA | 2049 | 2032-2050 |
| AD-75931 | GCUUUGAAAAUGCUGAGAAdTdT | 1974 | UUCUCAGCAUUUUCAAAGCdTdT | 2012 | GCUUUGAAAAUGCUGAGAA | 2050 | 2033-2051 |
| AD-75932 | CUUUGAAAAUGCUGAGAAAdTdT | 1975 | UUUCUCAGCAUUUUCAAAGdTdT | 2013 | CUUUGAAAAUGCUGAGAAA | 2051 | 2034-2052 |
| AD-75933 | UUUGAAAAUGCUGAGAAAAdTdT | 1976 | UUUUCUCAGCAUUUUCAAAdTdT | 2014 | UUUGAAAAUGCUGAGAAAA | 2052 | 2035-2053 |
| AD-70652 | UUGAAAAUGCUGAGAAAAAdTdT | 1977 | UUUUUCUCAGCAUUUUCAAdTdT | 2015 | UUGAAAAUGCUGAGAAAAA | 2053 | 2036-2054 |
| AD-75934 | UGAAAAUGCUGAGAAAAAAdTdT | 1978 | UUUUUUCUCAGCAUUUUCAdTdT | 2016 | UGAAAAUGCUGAGAAAAAA | 2054 | 2037-2055 |
| AD-75935 | GAAAAUGCUGAGAAAAAAAdTdT | 1979 | UUUUUUUCUCAGCAUUUUCdTdT | 2017 | GAAAAUGCUGAGAAAAAAA | 2055 | 2038-2056 |
| AD-75936 | AAAAUGCUGAGAAAAAAAAdTdT | 1980 | UUUUUUUUCUCAGCAUUUUdTdT | 2018 | AAAAUGCUGAGAAAAAAAA | 2056 | 2039-2057 |
| AD-75937 | AAAUGCUGAGAAAAAAAAAdTdT | 1981 | UUUUUUUUUCUCAGCAUUUdTdT | 2019 | AAAUGCUGAGAAAAAAAAA | 2057 | 2040-2058 |
| AD-75938 | AAUGCUGAGAAAAAAAAAAdTdT | 1982 | UUUUUUUUUUCUCAGCAUUdTdT | 2020 | AAUGCUGAGAAAAAAAAAA | 2058 | 2041-2059 |
| AD-75939 | AUGCUGAGAAAAAAAAAAAdTdT | 1983 | UUUUUUUUUUUCUCAGCAUdTdT | 2021 | AUGCUGAGAAAAAAAAAAA | 2059 | 2042-2060 |

TABLE 16
F12 Single Dose Screen in Hep3b Cells

| | 10 | 10 | 0.1 | 0.1 |
|---|---|---|---|---|
| Duplex ID | nM_AVG | nM_SD | nM_AVG | nM_SD |
| AD-70649.2 | 28.65 | 6.26 | 41.38 | 9.60 |
| AD-75921.1 | 29.32 | 7.31 | 41.14 | 10.86 |
| AD-75920.1 | 30.91 | 5.90 | 45.92 | 15.18 |
| AD-75919.1 | 32.12 | 14.45 | 66.98 | 17.31 |
| AD-75918.1 | 28.51 | 14.34 | 57.71 | 21.51 |
| AD-75917.1 | 22.80 | 1.02 | 33.45 | 5.13 |
| AD-75916.1 | 27.48 | 7.88 | 34.62 | 6.73 |
| AD-75915.1 | 50.58 | 28.39 | 56.95 | 39.88 |
| AD-75914.1 | 28.22 | 5.74 | 54.70 | 9.80 |
| AD-75913.1 | 38.35 | 11.58 | 32.08 | 9.74 |
| AD-75912.1 | 27.06 | 9.92 | 39.41 | 14.48 |
| AD-70650.2 | 31.86 | 12.64 | 40.42 | 11.08 |
| AD-75911.1 | 28.50 | 5.83 | 53.54 | 9.61 |
| AD-75910.1 | 34.12 | 6.44 | 47.93 | 22.85 |
| AD-75909.1 | 35.13 | 13.76 | 51.88 | 42.23 |
| AD-75908.1 | 38.17 | 7.67 | 66.18 | 59.34 |
| AD-75907.1 | 40.80 | 20.27 | 62.36 | 20.96 |
| AD-75906.1 | 49.29 | 8.64 | 58.20 | 26.56 |
| AD-75922.1 | 25.51 | 3.58 | 45.53 | 20.00 |
| AD-75923.1 | 49.08 | 13.60 | 49.27 | 11.54 |
| AD-70651.2 | 55.60 | 32.34 | 94.24 | 39.01 |
| AD-75924.1 | 46.27 | 14.11 | 53.33 | 11.68 |
| AD-75925.1 | 37.21 | 8.81 | 46.28 | 17.48 |
| AD-75926.1 | 27.13 | 6.82 | 39.29 | 8.19 |
| AD-75927.1 | 47.80 | 14.67 | 62.71 | 21.77 |
| AD-75928.1 | 34.40 | 6.27 | 70.89 | 29.90 |
| AD-75929.1 | 43.65 | 16.80 | 54.91 | 4.67 |
| AD-75930.1 | 72.67 | 33.09 | 81.86 | 17.63 |
| AD-75931.1 | 85.60 | 17.39 | 88.98 | 12.61 |
| AD-75932.1 | 46.69 | 3.04 | 68.57 | 12.35 |
| AD-75933.1 | 75.04 | 4.59 | 97.52 | 8.55 |
| AD-70652.2 | 104.50 | 12.08 | 84.12 | 4.74 |
| AD-75934.1 | 83.25 | 19.97 | 82.77 | 10.51 |
| AD-75935.1 | 65.87 | 3.46 | 84.47 | 11.66 |
| AD-75936.1 | 97.74 | 3.66 | 93.48 | 10.33 |
| AD-75937.1 | 112.45 | 30.62 | 98.91 | 29.75 |
| AD-75938.1 | 125.12 | 33.83 | 110.47 | 33.87 |
| AD-75939.1 | 112.95 | 24.79 | 93.19 | 18.21 |

### Example 10. Evaluation of 5′-End Modifications of F12 siRNA Duplexes

[0643] Additional iRNA agents targeting F12 comprising a nucleotide comprising a 5′-phosphate mimic, i.e., a vinyl phosphate, were designed, synthesized, and screened for in vitro efficacy, as described above. Agents comprising the same unmodified and modified nucleotide sequences of these agents but without the 5′-antisense strand vinyl phosphate modification were also designed, synthesized and screened, as described above. A detailed list of all of these additional unmodified F12 sense and antisense strand sequences is shown in Table 17. A detailed list of all of these additional modified F12 sense and antisense strand sequences is shown in Table 18. Table 19 provides the results of a single dose screen in primary mouse hepatocytes cells transfected with the indicated F12 dsRNA agents.

[0644] The in vivo efficacy of a subset of these compounds was also assessed by subcutaneously administering wild-type mice a single 0.5 mg/kg dose of an agent and determining the level of F12 protein in the plasma of the animals at days 3, 7, and 15 post-dose. FIG. 6 depicts the results of these assays and demonstrates that the addition of a 5′vinyl phosphate to the antisense strands has a moderate effect on the in vivo efficacy of the indicated agents.

TABLE 17
F12 Unmodified F12 Sequences

| | | SEQ | | SEQ | |
|---|---|---|---|---|---|
| Duplex | | ID | | ID | Range in SEQ |
| Name | Sense Sequence 5′ to 3′ | NO | Antisense Sequence 5′ to 3′ | NO | ID NO: 9 |
| AD-73610 | GGAGCCCAAGAAAGUGAAAGA | 2060 | UCUUUCACUUUCUUGGGCUCCAA | 2105 | 299-321 |
| AD-73633 | GGAGCCCAAGAAAGUGAAAGA | 2061 | UCUUUCACUUUCUUGGGCUCCAA | 2106 | 299-321 |
| AD-73604 | GAGCCCAAGAAAGUGAAAGAA | 2062 | UUCUUUCACUUUCUUGGGCUCCA | 2107 | 300-322 |
| AD-73627 | GAGCCCAAGAAAGUGAAAGAA | 2063 | UUCUUUCACUUUCUUGGGCUCCA | 2108 | 300-322 |
| AD-73595 | GCCCAAGAAAGUGAAAGACCA | 2064 | UGGUCUUUCACUUUCUUGGGCUC | 2109 | 302-324 |
| AD-73617 | GCCCAAGAAAGUGAAAGACCA | 2065 | UGGUCUUUCACUUUCUUGGGCUC | 2110 | 302-324 |
| AD-73606 | CCCAAGAAAGUGAAAGACCAA | 2066 | UUGGUCUUUCACUUUCUUGGGCU | 2111 | 303-325 |
| AD-73629 | CCCAAGAAAGUGAAAGACCAA | 2067 | UUGGUCUUUCACUUUCUUGGGCU | 2112 | 303-325 |
| AD-73609 | AAAGAGAAAUGCUUUGAGCCA | 2068 | UGGCUCAAAGCAUUUCUCUUUCU | 2113 | 426-448 |
| AD-73632 | AAAGAGAAAUGCUUUGAGCCA | 2069 | UGGCUCAAAGCAUUUCUCUUUCU | 2114 | 426-448 |
| AD-73599 | AAGAGAAAUGCUUUGAGCCUA | 2070 | UAGGCUCAAAGCAUUUCUCUUUC | 2115 | 427-449 |
| AD-73621 | AAGAGAAAUGCUUUGAGCCUA | 2071 | UAGGCUCAAAGCAUUUCUCUUUC | 2116 | 427-449 |
| AD-73597 | AGAGAAAUGCUUUGAGCCUCA | 2072 | UGAGGCUCAAAGCAUUUCUCUUU | 2117 | 428-450 |
| AD-73619 | AGAGAAAUGCUUUGAGCCUCA | 2073 | UGAGGCUCAAAGCAUUUCUCUUU | 2118 | 428-450 |
| AD-73596 | GAGAAAUGCUUUGAGCCUCAA | 2074 | UUGAGGCUCAAAGCAUUUCUCUU | 2119 | 429-451 |
| AD-73618 | GAGAAAUGCUUUGAGCCUCAA | 2075 | UUGAGGCUCAAAGCAUUUCUCUU | 2120 | 429-451 |
| AD-73614 | AGAAAUGCUUUGAGCCUCAGA | 2076 | UCUGAGGCUCAAAGCAUUUCUCU | 2121 | 430-452 |
| AD-73637 | AGAAAUGCUUUGAGCCUCAGA | 2077 | UCUGAGGCUCAAAGCAUUUCUCU | 2122 | 430-452 |
| AD-73611 | AAAUGCUUUGAGCCUCAGCUA | 2078 | UAGCUGAGGCUCAAAGCAUUUCU | 2123 | 432-454 |
| AD-73634 | AAAUGCUUUGAGCCUCAGCUA | 2079 | UAGCUGAGGCUCAAAGCAUUUCU | 2124 | 432-454 |
| AD-73605 | AUGCUUUGAGCCUCAGCUUCA | 2080 | UGAAGCUGAGGCUCAAAGCAUUU | 2125 | 434-456 |
| AD-73628 | AUGCUUUGAGCCUCAGCUUCA | 2081 | UGAAGCUGAGGCUCAAAGCAUUU | 2126 | 434-456 |
| AD-73601 | UGCUUUGAGCCUCAGCUUCUA | 2082 | UAGAAGCUGAGGCUCAAAGCAUU | 2127 | 435-457 |
| AD-73624 | UGCUUUGAGCCUCAGCUUCUA | 2083 | UAGAAGCUGAGGCUCAAAGCAUU | 2128 | 435-457 |
| AD-73613 | GCUUUGAGCCUCAGCUUCUCA | 2084 | UGAGAAGCUGAGGCUCAAAGCAU | 2129 | 436-458 |
| AD-73636 | GCUUUGAGCCUCAGCUUCUCA | 2085 | UGAGAAGCUGAGGCUCAAAGCAU | 2130 | 436-458 |
| AD-73616 | ACUCCACCUUCCUGCAGGAGA | 2086 | UCUCCUGCAGGAAGGUGGAGUAU | 2131 | 1522-1544 |
| AD-73639 | ACUCCACCUUCCUGCAGGAGA | 2087 | UCUCCUGCAGGAAGGUGGAGUAU | 2132 | 1522-1544 |
| AD-73603 | CACAGAAACUCAAUAAAGUGA | 2088 | UCACUUUAUUGAGUUUCUGUGCC | 2133 | 1927-1949 |
| AD-73626 | CACAGAAACUCAAUAAAGUGA | 2089 | UCACUUUAUUGAGUUUCUGUGCC | 2134 | 1927-1949 |
| AD-73607 | ACAGAAACUCAAUAAAGUGCA | 2090 | UGCACUUUAUUGAGUUUCUGUGC | 2135 | 1928-1950 |
| AD-73630 | ACAGAAACUCAAUAAAGUGCA | 2091 | UGCACUUUAUUGAGUUUCUGUGC | 2136 | 1928-1950 |
| AD-73600 | CAGAAACUCAAUAAAGUGCUA | 2092 | UAGCACUUUAUUGAGUUUCUGUG | 2137 | 1929-1951 |
| AD-73622 | CAGAAACUCAAUAAAGUGCUA | 2093 | UAGCACUUUAUUGAGUUUCUGUG | 2138 | 1929-1951 |
| AD-73615 | AGAAACUCAAUAAAGUGCUUA | 2094 | UAAGCACUUUAUUGAGUUUCUGU | 2139 | 1930-1952 |
| AD-73638 | AGAAACUCAAUAAAGUGCUUA | 2095 | UAAGCACUUUAUUGAGUUUCUGU | 2140 | 1930-1952 |
| AD-73598 | GAAACUCAAUAAAGUGCUUUA | 2096 | UAAAGCACUUUAUUGAGUUUCUG | 2141 | 1931-1953 |
| AD-73620 | GAAACUCAAUAAAGUGCUUUA | 2097 | UAAAGCACUUUAUUGAGUUUCUG | 2142 | 1931-1953 |
| AD-73602 | AAACUCAAUAAAGUGCUUUGA | 2098 | UCAAAGCACUUUAUUGAGUUUCU | 2143 | 1932-1954 |
| AD-73625 | AAACUCAAUAAAGUGCUUUGA | 2099 | UCAAAGCACUUUAUUGAGUUUCU | 2144 | 1932-1954 |
| AD-73608 | ACUCAAUAAAGUGCUUUGAAA | 2100 | UUUCAAAGCACUUUAUUGAGUUU | 2145 | 1934-1956 |
| AD-73631 | ACUCAAUAAAGUGCUUUGAAA | 2101 | UUUCAAAGCACUUUAUUGAGUUU | 2146 | 1934-1956 |
| AD-73612 | UCAAUAAAGUGCUUUGAAAAA | 2102 | UUUUUCAAAGCACUUUAUUGAGU | 2147 | 1936-1958 |
| AD-73635 | UCAAUAAAGUGCUUUGAAAAA | 2103 | UUUUUCAAAGCACUUUAUUGAGU | 2148 | 1936-1958 |
| AD-73623 | AACUCAAUAAAGUGCUUUGAA | 2104 | UUCAAAGCACUUUAUUGAGUUUC | 2149 | 1933-1955 |
| AD-74838 | AAUAAAGUGCUUUGAAAACGA | 2333 | UCGUUUUCAAAGCACUUUAUUGA | 2335 | 1938-1960 |
| AD-74842 | AAUAAAGUGCUUUGAAAACGA | 2334 | UCGUUUUCAAAGCACUUUAUUGA | 2336 | 1938-1960 |

TABLE 18
Modified F12 Sequences

| | | SEQ | | SEQ |
|---|---|---|---|---|
| Duplex | | ID | | ID |
| Name | Sense Sequence 5′ to 3′ | NO | Antisense Sequence 5′ to 3′ | NO |
| AD-73610 | gsgsagccCfaAfGfAfaagugaaagaL96 | 2150 | usCfsuuuCfaCfUfuucuUfgGfgcuccsasa | 2195 |
| AD-73633 | gsgsagccCfaAfGfAfaagugaaagaL96 | 2151 | PusCfsuuuCfaCfUfuucuUfgGfgcuccsasa | 2196 |
| AD-73604 | gsasgcccAfaGfAfAfagugaaagaaL96 | 2152 | usUfscuuUfcAfCfuuucUfuGfggcucscsa | 2197 |
| AD-73627 | gsasgcccAfaGfAfAfagugaaagaaL96 | 2153 | PusUfscuuUfcAfCfuuucUfuGfggcucscsa | 2198 |
| AD-73595 | gscsccaaGfaAfAfGfugaaagaccaL96 | 2154 | usGfsgucUfuUfCfacuuUfcUfugggcsusc | 2199 |
| AD-73617 | gscsccaaGfaAfAfGfugaaagaccaL96 | 2155 | PusGfsgucUfuUfCfacuuUfcUfugggcsusc | 2200 |
| AD-73606 | cscscaagAfaAfGfUfgaaagaccaaL96 | 2156 | usUfsgguCfuUfUfcacuUfuCfuugggscsu | 2201 |
| AD-73629 | cscscaagAfaAfGfUfgaaagaccaaL96 | 2157 | PusUfsgguCfuUfUfcacuUfuCfuugggscsu | 2202 |
| AD-73609 | asasagagAfaAfUfGfcuuugagccaL96 | 2158 | usGfsgcuCfaAfAfgcauUfuCfucuuuscsu | 2203 |
| AD-73632 | asasagagAfaAfUfGfcuuugagccaL96 | 2159 | PusGfsgcuCfaAfAfgcauUfuCfucuuuscsu | 2204 |
| AD-73599 | asasgagaAfaUfGfCfuuugagccuaL96 | 2160 | usAfsggcUfcAfAfagcaUfuUfcucuususc | 2205 |
| AD-73621 | asasgagaAfaUfGfCfuuugagccuaL96 | 2161 | PusAfsggcUfcAfAfagcaUfuUfcucuususc | 2206 |
| AD-73597 | asgsagaaAfuGfCfUfuugagccucaL96 | 2162 | usGfsaggCfuCfAfaagcAfuUfucucususu | 2207 |
| AD-73619 | asgsagaaAfuGfCfUfuugagccucaL96 | 2163 | PusGfsaggCfuCfAfaagcAfuUfucucususu | 2208 |
| AD-73596 | gsasgaaaUfgCfUfUfugagccucaaL96 | 2164 | usUfsgagGfcUfCfaaagCfaUfuucucsusu | 2209 |
| AD-73618 | gsasgaaaUfgCfUfUfugagccucaaL96 | 2165 | PusUfsgagGfcUfCfaaagCfaUfuucucsusu | 2210 |
| AD-73614 | asgsaaauGfcUfUfUfgagccucagaL96 | 2166 | usCfsugaGfgCfUfcaaaGfcAfuuucuscsu | 2211 |
| AD-73637 | asgsaaauGfcUfUfUfgagccucagaL96 | 2167 | PusCfsugaGfgCfUfcaaaGfcAfuuucuscsu | 2212 |
| AD-73611 | asasaugcUfuUfGfAfgccucagcuaL96 | 2168 | usAfsgcuGfaGfGfcucaAfaGfcauuuscsu | 2213 |
| AD-73634 | asasaugcUfuUfGfAfgccucagcuaL96 | 2169 | PusAfsgcuGfaGfGfcucaAfaGfcauuuscsu | 2214 |
| AD-73605 | asusgcuuUfgAfGfCfcucagcuucaL96 | 2170 | usGfsaagCfuGfAfggcuCfaAfagcaususu | 2215 |
| AD-73628 | asusgcuuUfgAfGfCfcucagcuucaL96 | 2171 | PusGfsaagCfuGfAfggcuCfaAfagcaususu | 2216 |
| AD-73601 | usgscuuuGfaGfCfCfucagcuucuaL96 | 2172 | usAfsgaaGfcUfGfaggcUfcAfaagcasusu | 2217 |
| AD-73624 | usgscuuuGfaGfCfCfucagcuucuaL96 | 2173 | PusAfsgaaGfcUfGfaggcUfcAfaagcasusu | 2218 |
| AD-73613 | gscsuuugAfgCfCfUfcagcuucucaL96 | 2174 | usGfsagaAfgCfUfgaggCfuCfaaagcsasu | 2219 |
| AD-73636 | gscsuuugAfgCfCfUfcagcuucucaL96 | 2175 | PusGfsagaAfgCfUfgaggCfuCfaaagcsasu | 2220 |
| AD-73616 | ascsuccaCfcUfUfCfcugcaggagaL96 | 2176 | usCfsuccUfgCfAfggaaGfgUfggagusasu | 2221 |
| AD-73639 | ascsuccaCfcUfUfCfcugcaggagaL96 | 2177 | PusCfsuccUfgCfAfggaaGfgUfggagusasu | 2222 |
| AD-73603 | csascagaAfaCfUfCfaauaaagugaL96 | 2178 | usCfsacuUfuAfUfugagUfuUfcugugscsc | 2223 |
| AD-73626 | csascagaAfaCfUfCfaauaaagugaL96 | 2179 | PusCfsacuUfuAfUfugagUfuUfcugugscsc | 2224 |
| AD-73607 | ascsagaaAfcUfCfAfauaaagugcaL96 | 2180 | usGfscacUfuUfAfuugaGfuUfucugusgsc | 2225 |
| AD-73630 | ascsagaaAfcUfCfAfauaaagugcaL96 | 2181 | PusGfscacUfuUfAfuugaGfuUfucugusgsc | 2226 |
| AD-73600 | csasgaaaCfuCfAfAfuaaagugcuaL96 | 2182 | usAfsgcaCfuUTUfauugAfgUfuucugsusg | 2227 |
| AD-73622 | csasgaaaCfuCfAfAfuaaagugcuaL96 | 2183 | PusAfsgcaCfuUfUfauugAfgUfuucugsusg | 2228 |
| AD-73615 | asgsaaacUfcAfAfUfaaagugcuuaL96 | 2184 | usAfsagcAfcUfUfuauuGfaGfuuucusgsu | 2229 |
| AD-73638 | asgsaaacUfcAfAfUfaaagugcuuaL96 | 2185 | PusAfsagcAfcUfUfuauuGfaGfuuucusgsu | 2230 |
| AD-73598 | gsasaacuCfaAfUfAfaagugcuuuaL96 | 2186 | usAfsaagCfaCfUfuuauUfgAfguuucsusg | 2231 |
| AD-73620 | gsasaacuCfaAfUfAfaagugcuuuaL96 | 2187 | PusAfsaagCfaCfUfuuauUfgAfguuucsusg | 2232 |
| AD-73602 | asasacucAfaUfAfAfagugcuuugaL96 | 2188 | usCfsaaaGfcAfCfuuuaUfuGfaguuuscsu | 2233 |
| AD-73625 | asasacucAfaUfAfAfagugcuuugaL96 | 2189 | PusCfsaaaGfcAfCfuuuaUfuGfaguuuscsu | 2234 |
| AD-73608 | ascsucaaUfaAfAfGfugcuuugaaaL96 | 2190 | usUfsucaAfaGfCfacuuUfaUfugagususu | 2235 |
| AD-73631 | ascsucaaUfaAfAfGfugcuuugaaaL96 | 2191 | PusUfsucaAfaGfCfacuuUfaUfugagususu | 2236 |
| AD-73612 | uscsaauaAfaGfUfGfcuuugaaaaaL96 | 2192 | usUfsuuuCfaAfAfgcacUfuUfauugasgsu | 2237 |
| AD-73635 | uscsaauaAfaGfUfGfcuuugaaaaaL96 | 2193 | PusUfsuuuCfaAfAfgcacUfuUfauugasgsu | 2238 |
| AD-73623 | asascucaAfuAfAfAfgugcuuugaaL96 | 2194 | PusUfscaaAfgCfAfcuuuAfuUfgaguususc | 2239 |
| AD-74838 | asasuaaaGfuGfCfUfuugaaaacgaL96 | 2337 | usCfsguuUfuCfAfaagcAfcUfuuauusgsa | 2339 |
| AD-74842 | asasuaaaGfuGfCfUfuugaaaacgaL96 | 2338 | PusCfsguuUfuCfAfaagcAfcUfuuauusgsa | 2340 |
| | | | | SEQ |
| | | Duplex | | ID |
| | | Name | mRNA target sequence | NO |
| | | AD-73610 | UUGGAGCCCAAGAAAGUGAAAGA | 2240 |
| | | AD-73633 | UUGGAGCCCAAGAAAGUGAAAGA | 2241 |
| | | AD-73604 | UGGAGCCCAAGAAAGUGAAAGAC | 2242 |
| | | AD-73627 | UGGAGCCCAAGAAAGUGAAAGAC | 2243 |
| | | AD-73595 | GAGCCCAAGAAAGUGAAAGACCA | 2244 |
| | | AD-73617 | GAGCCCAAGAAAGUGAAAGACCA | 2245 |
| | | AD-73606 | AGCCCAAGAAAGUGAAAGACCAU | 2246 |
| | | AD-73629 | AGCCCAAGAAAGUGAAAGACCAU | 2247 |
| | | AD-73609 | AGAAAGAGAAAUGCUUUGAGCCU | 2248 |
| | | AD-73632 | AGAAAGAGAAAUGCUUUGAGCCU | 2249 |
| | | AD-73599 | GAAAGAGAAAUGCUUUGAGCCUC | 2250 |
| | | AD-73621 | GAAAGAGAAAUGCUUUGAGCCUC | 2251 |
| | | AD-73597 | AAAGAGAAAUGCUUUGAGCCUCA | 2252 |
| | | AD-73619 | AAAGAGAAAUGCUUUGAGCCUCA | 2253 |
| | | AD-73596 | AAGAGAAAUGCUUUGAGCCUCAG | 2254 |
| | | AD-73618 | AAGAGAAAUGCUUUGAGCCUCAG | 2255 |
| | | AD-73614 | AGAGAAAUGCUUUGAGCCUCAGC | 2256 |
| | | AD-73637 | AGAGAAAUGCUUUGAGCCUCAGC | 2257 |
| | | AD-73611 | AGAAAUGCUUUGAGCCUCAGCUU | 2258 |
| | | AD-73634 | AGAAAUGCUUUGAGCCUCAGCUU | 2259 |
| | | AD-73605 | AAAUGCUUUGAGCCUCAGCUUCU | 2260 |
| | | AD-73628 | AAAUGCUUUGAGCCUCAGCUUCU | 2261 |
| | | AD-73601 | AAUGCUUUGAGCCUCAGCUUCUC | 2262 |
| | | AD-73624 | AAUGCUUUGAGCCUCAGCUUCUC | 2263 |
| | | AD-73613 | AUGCUUUGAGCCUCAGCUUCUCA | 2264 |
| | | AD-73636 | AUGCUUUGAGCCUCAGCUUCUCA | 2265 |
| | | AD-73616 | AUACUCCACCUUCCUGCAGGAGG | 2266 |
| | | AD-73639 | AUACUCCACCUUCCUGCAGGAGG | 2267 |
| | | AD-73603 | GGCACAGAAACUCAAUAAAGUGC | 2268 |
| | | AD-73626 | GGCACAGAAACUCAAUAAAGUGC | 2269 |
| | | AD-73607 | GCACAGAAACUCAAUAAAGUGCU | 2270 |
| | | AD-73630 | GCACAGAAACUCAAUAAAGUGCU | 2271 |
| | | AD-73600 | CACAGAAACUCAAUAAAGUGCUU | 2272 |
| | | AD-73622 | CACAGAAACUCAAUAAAGUGCUU | 2273 |
| | | AD-73615 | ACAGAAACUCAAUAAAGUGCUUU | 2274 |
| | | AD-73638 | ACAGAAACUCAAUAAAGUGCUUU | 2275 |
| | | AD-73598 | CAGAAACUCAAUAAAGUGCUUUG | 2276 |
| | | AD-73620 | CAGAAACUCAAUAAAGUGCUUUG | 2277 |
| | | AD-73602 | AGAAACUCAAUAAAGUGCUUUGA | 2278 |
| | | AD-73625 | AGAAACUCAAUAAAGUGCUUUGA | 2279 |
| | | AD-73608 | AAACUCAAUAAAGUGCUUUGAAA | 2280 |
| | | AD-73631 | AAACUCAAUAAAGUGCUUUGAAA | 2281 |
| | | AD-73612 | ACUCAAUAAAGUGCUUUGAAAAC | 2282 |
| | | AD-73635 | ACUCAAUAAAGUGCUUUGAAAAC | 2283 |
| | | AD-73623 | GAAACUCAAUAAAGUGCUUUGAA | 2284 |
| | | AD-74838 | UCAAUAAAGUGCUUUGAAAACGA | 2341 |
| | | AD-74842 | UCAAUAAAGUGCUUUGAAAACGA | 2342 |

TABLE 19
F12 Single Dose Screen in Primary Mouse Hepatocytes

| Activity | |
|---|---|
| 10 nM | 0.1 nM* |

| Duplex ID | Avg | SD | Avg | SD |
|---|---|---|---|---|
| AD-67244 | 7.5 | 2.3 | 69.5 | 4.6 |
| AD-73610 | 46.8 | 14.1 | 104.7 | 10.1 |
| AD-73633 | 18.0 | 6.8 | 69.2 | 13.3 |
| AD-73604 | 21.0 | 6.3 | 100.3 | 10.0 |
| AD-73627 | 10.5 | 3.2 | 55.5 | 5.7 |
| AD-73595 | 29.0 | 7.6 | 96.1 | 4.8 |
| AD-73617 | 12.4 | 4.9 | 66.1 | 10.5 |
| AD-73606 | 11.8 | 3.6 | 93.2 | 4.1 |
| AD-73629 | 14.9 | 4.6 | 57.8 | 6.4 |
| AD-73609 | 35.2 | 4.7 | 89.6 | 5.0 |
| AD-73632 | 3.3 | 0.6 | 46.5 | 8.0 |
| AD-73599 | 11.7 | 2.2 | 84.4 | 10.9 |
| AD-73621 | 5.9 | 1.7 | 34.8 | 4.4 |
| AD-73597 | 9.4 | 1.8 | 60.6 | 3.0 |
| AD-73619 | 5.0 | 1.7 | 21.0 | 7.4 |
| AD-73596 | 7.3 | 3.1 | 53.2 | 10.9 |
| AD-73618 | 4.6 | 2.4 | 29.4 | 8.2 |
| AD-73614 | 24.0 | 8.8 | 96.0 | 4.8 |
| AD-73637 | 7.1 | 2.2 | 47.3 | 6.9 |
| AD-73611 | 17.3 | 3.8 | 92.5 | 4.0 |
| AD-73634 | 7.1 | 3.5 | 54.5 | 12.5 |
| AD-73605 | 10.2 | 2.1 | 88.7 | 6.0 |
| AD-73628 | 5.7 | 0.4 | 23.5 | 8.1 |
| AD-73601 | 6.4 | 2.4 | 67.4 | 9.9 |
| AD-73624 | 3.0 | 0.5 | 28.0 | 5.9 |
| AD-73613 | 16.4 | 5.3 | 92.6 | 8.8 |
| AD-73636 | 4.8 | 1.5 | 22.5 | 7.2 |
| AD-73616 | 99.7 | 8.0 | 97.3 | 3.2 |
| AD-73639 | 35.5 | 4.8 | 100.3 | 6.7 |
| AD-73603 | 12.8 | 5.0 | 87.7 | 7.2 |
| AD-73626 | 2.2 | 0.8 | 19.8 | 4.3 |
| AD-73607 | 17.4 | 5.6 | 90.0 | 6.4 |
| AD-73630 | 3.9 | 1.2 | 25.0 | 7.3 |
| AD-73600 | 2.7 | 1.5 | 24.9 | 4.9 |
| AD-73622 | 1.5 | 0.2 | 16.2 | 2.3 |
| AD-73615 | 7.6 | 3.6 | 51.9 | 4.8 |
| AD-73638 | 3.7 | 1.5 | 17.6 | 5.6 |
| AD-73598 | 2.0 | 0.5 | 18.7 | 7.5 |
| AD-73620 | 2.0 | 0.3 | 9.5 | 3.4 |
| AD-73602 | 4.4 | 1.9 | 48.7 | 8.4 |
| AD-73625 | 3.3 | 1.4 | 9.8 | 2.0 |
| AD-73608 | 5.5 | 1.3 | 65.4 | 10.7 |
| AD-73631 | 2.1 | 0.4 | 11.1 | 1.9 |
| AD-73612 | 5.4 | 1.4 | 49.1 | 7.3 |
| AD-73635 | 3.5 | 0.7 | 13.0 | 2.5 |
| AD-73623 | 2.5 | 0.4 | 7.2 | 1.2 |

### Example 11. AD-67244 Inhibits Venous Thrombosis and Arterial Thrombosis And Does Not Inhibit Hemostasis

[0645] Using a mouse model of large vein thrombosis, the in vivo efficacy of AD-67244 to inhibit platelet deposition and fibrin deposition was assessed. The venous electrolytic injury mouse model induces formation of thrombi in large vessels in the presence of continuous blood flow and is an art-recognized relevant animal model of clinical deep vein thrombosis (DVT) formation (e.g., versus mechanical occlusion or stenosis to cause thrombosis). See, Cooley et al., (2005) Thromb Haemost. 94 (3):498-503, Cooley BC, (2011) Arterioscler Thromb Vase Biol. 31 (6):1351-1356 and Diaz et al., (2012) Arterioscler Thromb Vase Biol. 32(3):556-562.

[0646] Mice (n=8/group) were subcutaneously administered a single 0.3 mg/kg, 0.75 mg/kg, or 10 mg/kg dose of AD-67244 or PBS as a control. On Day 10 post-dose, animals were anesthetized and administered fluorescent anti-fibrin and anti-platelet antibodies. The femoral vein was exposed, and electrolytic injuries were induced on the surface of the vein. Intra-vital fluorescence quantitation of platelet and fibrin accumulation through 60 minutes was measured. Subsequent to the procedure, animals were sacrificed and liver samples collected for mRNA isolation and quantification, as described above.

[0647] As shown in FIGS. 7A and 7B, administration of all doses of AD-67244 significantly inhibited platelet (FIG. 7A) deposition and fibrin deposition (FIG. 7B) at the site of injury. FIG. 7C demonstrates that, at all doses tested, the effect of a single dose of AD-67244 on F12 mRNA expression was durable and F12 mRNA levels remained below about 50% on Day 10 post-dose. Real-time images of fibrin and platelet deposition in control mice and mice administered a single dose of 10 mg/kg of AD-67244 are shown in FIGS. 8A and 8B, respectively, and shown that both fibrin and platelet deposition at the site of injury are significantly inhibited.

[0648] The in vivo efficacy of AD-67244 to inhibit arterial thrombosis was also assessed using a well-known mouse model. Specifically, ferric chloride (FeCl3) induced vascular injury is a widely used model of occlusive thrombosis that reports platelet activation and aggregation in the context of a closed vascular system. This model is based on redox-induced endothelial cell injury, which is simple and sensitive to both anticoagulant and anti-platelets drugs. The time required for the development of a thrombus that occludes blood flow gives a quantitative measure of vascular injury, platelet activation and aggregation that is relevant to thrombotic diseases.

[0649] Mice (n=8/group) were subcutaneously administered a single 10 mg/kg dose of AD-67244 or PBS as a control. On Day 10 post-dose, animals were anesthetized and the carotid artery was exposed. A thrombus was induced by touching the corner of a piece of filter paper soaked in a 20% FeCl3 solution to the surface of the carotid artery. The filter paper was then removed and the time required for the development of a thrombus that occluded blood flow was measured. Subsequent to the procedure, animals were sacrificed and liver samples collected for mRNA isolation and quantification, as described above.

[0650] FIG. 9A demonstrates that the time to occlusion in mice administered a single 10 mg/kg dose of AD-67244 is not significantly different that the time to occlusion in mice administered PBS. FIG. 9B demonstrates that at Day 10 post-dose there was greater than a 97% knockdown of F12 mRNA.

[0651] As discussed above, AD-67244 effectively inhibits platelet and fibrin deposition. AD-67244 also inhibits both venous and arterial thrombus formation. Accordingly, in order to determine whether the anti-thrombotic effect of AD-67244 increases bleeding risk by impairing hemostasis, two well-known mouse models of hemostasis were used; the saphenous vein bleeding mouse model and the mouse tail tip transection model.

[0652] In the saphenous vein bleeding model, mice (n=8) were administered a single subcutaneous 10 mg/kg dose of AD-67244 or PBS control (n=8). At Day 10 post-dose, the right saphenous vein of the mice was transected and blood was gently wicked away until hemostasis occurred. The clot was then removed to restart bleeding and the blood was again wicked away until hemostasis re-occured. Clot disruption was repeated after every incidence of hemostasis for 30 minutes. The time required for each hemostasis was measured.

As demonstrated in FIG. 10A, administration of AD-67244 did not inhibit hemostasis as compared to administration of PBS.

[0653] In the tail tip transection model, mice (n=8) were administered a single subcutaneous 10 mg/kg dose of AD-67244, PBS control (n=8), or 300 U/kg heparin At Day 10 post-dose, the tail was transected 1-5 mm from the tip and bleeding from the tail tip was monitored until cessation. The time to hemostasis or blood flow cessation was monitored. As demonstrated in FIG. 10B, unlike heparin administration, administration of AD-67244 did not inhibit hemostasis.

### EQUIVALENTS

[0654] Those skilled in the art will recognize, or be able to ascertain using no more than routine experimentation, many equivalents to the specific embodiments and methods described herein. Such equivalents are intended to be encompassed by the scope of the following claims.

1. A double stranded ribonucleic acid (dsRNA) agent that inhibits the expression of F12 for use in treating a subject having a contact activation pathway-associated disease,
wherein the dsRNA agent comprises a sense strand and an antisense strand forming a double stranded region, wherein the antisense strand comprises at least 15 contiguous nucleotides differing b no more than 3 nucleotides from the nucleotide sequence of
5'-UUCAAAGCACUUUAUUGAGUUUC-3' (SEQ ID NO:899),
wherein when the dsRNA agent is administered to the subject, hemostasis in the subject is not inhibited.

2. (canceled)

3. (canceled)

4. The dsRNA agent of claim 1, wherein the subject is a human.

5. The dsRNA agent of claim 1, wherein the contact activation pathway-associated disease is selected from the group consisting of thrombophilia, hereditary angioedema (HAE), Flectcher Factor Deficiency, or essential hypertension.

6. The dsRNA agent of claim 1, wherein the administration of the dsRNA agent to the subject decreases platelet deposition in the subject; and/or decreases fibrin deposition in the subject.

7. (canceled)

8. The dsRNA agent of claim 1, wherein the dsRNA is suitable for administration to the subject at a dose of about 0.01 mg/kg to about 10 mg/kg or about 0.5 mg/kg to about 50 mg/kg.

9. The dsRNA agent of claim 1, wherein the dsRNA agent is suitable for subcutaneous administration to the subject.

10. (canceled)

11. The dsRNA agent of claim 1, wherein each strand is no more than 30 nucleotides in length.

12. The dsRNA agent of claim 1, wherein the dsRNA agent comprises at least one nucleotide modification.

13. The dsRNA agent of claim 12, wherein substantially all of the nucleotides of the dsRNA agent comprise a nucleotide modification.

14. The dsRNA agent of claim 12, wherein the nucleotide modification is selected from the group consisting of a deoxy-nucleotide modification, a 3′-terminal deoxy-thymine (dT) nucleotide modification, a 2′—O-methyl nucleotide modification, a 2′-fluoro nucleotide modification, a 2′-deoxy nucleotide modification, a locked nucleotide modification, an unlocked nucleotide modification, a conformationally restricted nucleotide modification, a constrained ethyl nucleotide modification, an abasic nucleotide modification, a 2′-amino nucleotide modification, a 2′—O-allyl-nucleotide modification, 2′-C-alkyl nucleotide modification, 2′-hydroxly-nucleotide modification, a 2′-methoxyethyl nucleotide modification, a 2′—O-alkyl-nucleotide modification, a morpholino nucleotide modification, a phosphoramidate modification, a non-natural base comprising nucleotide modification, a tetrahydropyran nucleotide modification, a 1,5-anhydrohexitol nucleotide modification, a cyclohexenyl nucleotide modification, a nucleotide comprising a phosphorothioate group modification, a nucleotide comprising a methylphosphonate group modification, a nucleotide comprising a 5′-phosphate modification, and a nucleotide comprising a 5′-phosphate mimic modification.

15. The dsRNA agent of claim 1, wherein the dsRNA agent further comprises at least one phosphorothioate internucleotide linkage.

16. The dsRNA agent of claim 1, wherein at least one strand of the dsRNA agent comprises a 3′ overhang of at least 1 nucleotide.

17. The dsRNA agent of claim 1, wherein the dsRNA agent further comprises a ligand.

18. The dsRNA agent of claim 17, wherein the ligand is conjugated to the 3′ end of the sense strand of the dsRNA agent.

19. The dsRNA agent of claim 17, wherein the ligand is an N-acetylgalactosamine (GalNAc) derivative through a monovalent, a bivalent, or a trivalent branched linker.

20. The dsRNA agent of claim 19, wherein the N-acetylgalactosamine (GalNAc) derivative is

[chemical structure]

21. The dsRNA agent of claim 20, wherein the dsRNA is conjugated to the ligand as shown in the following schematic [chemical structure]
and, wherein X is O or S.

22. The dsRNA agent of claim 21, wherein X is O.

23. The dsRNA agent of claim 1, wherein the dsRNA agent comprises a sense strand comprising the nucleotide sequence of 5′-AACUCAAUAAAGUGCUUUGAA-3′ (SEQ ID NO:891), and an antisense strand comprising the nucleotide sequence of 5′-UUCAAAGCACUUUAUUGAGUUUC-3′ (SEQ ID NO:899).

24. The dsRNA agent of claim 23, wherein the dsRNA agent comprises a sense strand comprising the sequence of 5′-asascucaAfuAfAfAfgugcuuugaa-3′ (SEQ ID NO:907) and an antisense strand comprising the sequence of 5′-usUfscaaAfgCfAfcuuuAfuUfgaguususc-3′ (SEQ ID NO:915), and wherein a, c, g, and u are 2′—O-methyl (2′—OMe) A, C, G, and U; Af, Cf, Gf, and Uf are 2′-fluoro A, C, G, and U; and s is a phosphorothioate linkage.

25. (canceled)

The application's sequence listing, which the Patent Office published only in electronic form, follows.

SEQUENCE LISTING (2344 sequences)

SEQ ID NO: 1 - DNA, 2252 bp, Homo sapiens
  source 1..2252: mol_type = genomic DNA
agaacagcttgaagaccgttcatttttaagtgacaagagactcacctccaagaagcaattgtgttttcagaatgattttattcaagcaagcaacttatttcatttccttgtttgctacagtttcctgtggatgtctgactcaactctatgaaaacgccttcttcagaggtggggatgtagcttccatgtacaccccaaatgcccaatactgccagatgaggtgcacattccacccaaggtgtttgctattcagttttcttccagcaagttcaatcaatgacatggagaaaaggtttggttgcttcttgaaagatagtgttacaggaaccctgccaaaagtacatcgaacaggtgcagtttctggacattccttgaagcaatgtggtcatcaaataagtgcttgccatcgagacatttataaaggagttgatatgagaggagtcaattttaatgtgtctaaggttagcagtgttgaagaatgccaaaaaaggtgcaccagtaacattcgctgccagtttttttcatatgccacgcaaacatttcacaaggcagagtaccggaacaattgcctattaaagtacagtcccggaggaacacctaccgctataaaggtgctgagtaacgtggaatctggattctcactgaagccctgtgccctttcagaaattggttgccacatgaacatcttccagcatcttgcgttctcagatgtggatgttgccagggttctcactccagatgcttttgtgtgtcggaccatctgcacctatcaccccaactgcctcttctttacattctatacaaatgtatggaaaatcgagtcacaaagaaatgtttgtcttcttaaaacatctgaaagtggcacaccaagttcctctactcctcaagaaaacaccatatctggatatagccttttaacctgcaaaagaactttacctgaaccctgccattctaaaatttacccgggagttgactttggaggagaagaattgaatgtgacttttgttaaaggagtgaatgtttgccaagagacttgcacaaagatgattcgctgtcagtttttcacttattctttactcccagaagactgtaaggaagagaagtgtaagtgtttcttaagattatctatggatggttctccaactaggattgcgtatgggacacaagggagctctggttactctttgagattgtgtaacactggggacaactctgtctgcacaacaaaaacaagcacacgcattgttggaggaacaaactcttcttggggagagtggccctggcaggtgagcctgcaggtgaagctgacagctcagaggcacctgtgtggagggtcactcataggacaccagtgggtcctcactgctgcccactgctttgatgggcttcccctgcaggatgtttggcgcatctatagtggcattttaaatctgtcagacattacaaaagatacacctttctcacaaataaaagagattattattcaccaaaactataaagtctcagaagggaatcatgatatcgccttgataaaactccaggctcctttgaattacactgaattccaaaaaccaatatgcctaccttccaaaggtgacacaagcacaatttataccaactgttgggtaaccggatggggcttctcgaaggagaaaggtgaaatccaaaatattctacaaaaggtaaatattcctttggtaacaaatgaagaatgccagaaaagatatcaagattataaaataacccaacggatggtctgtgctggctataaagaagggggaaaagatgcttgtaagggagattcaggtggtcccttagtttgcaaacacaatggaatgtggcgtttggtgggcatcaccagctggggtgaaggctgtgcccgcagggagcaacctggtgtctacaccaaagtcgctgagtacatggactggattttagagaaaacacagagcagtgatggaaaagctcagatgcagtcaccagcatgagaagcagtccagagtctaggcaatttttacaacctgagttcaagtcaaattctgagcctggggggtcctcatctgcaaagcatggagagtggcatcttctttgcatcctaaggacgaaaaacacagtgcactcagagctgctgaggacaatgtctggctgaagcccgctttcagcacgccgtaaccaggggctgacaatgcgaggtcgcaactgagatctccatgactgtgtgttgtgaaataaaatggtgaaagatcaaaaaa

SEQ ID NO: 2 - DNA, 2252 bp, Homo sapiens
  source 1..2252: mol_type = genomic DNA
ttttttgatctttcaccattttatttcacaacacacagtcatggagatctcagttgcgacctcgcattgtcagcccctggttacggcgtgctgaaagcgggcttcagccagacattgtcctcagcagctctgagtgcactgtgtttttcgtccttaggatgcaaagaagatgccactctccatgctttgcagatgaggaccccccaggctcagaatttgacttgaactcaggttgtaaaaattgcctagactctggactgcttctcatgctggtgactgcatctgagcttttccatcactgctctgtgttttctctaaaatccagtccatgtactcagcgactttggtgtagacaccaggttgctccctgcgggcacagccttcaccccagctggtgatgcccaccaaacgccacattccattgtgtttgcaaactaagggaccacctgaatctcccttacaagcatcttttcccccttctttatagccagcacagaccatccgttgggttattttataatcttgatatcttttctggcattcttcatttgttaccaaaggaatatttaccttttgtagaatattttggatttcacctttctccttcgagaagccccatccggttacccaacagttggtataaattgtgcttgtgtcacctttggaaggtaggcatattggtttttggaattcagtgtaattcaaaggagcctggagttttatcaaggcgatatcatgattcccttctgagactttatagttttggtgaataataatctcttttatttgtgagaaaggtgtatcttttgtaatgtctgacagatttaaaatgccactatagatgcgccaaacatcctgcaggggaagcccatcaaagcagtgggcagcagtgaggacccactggtgtcctatgagtgaccctccacacaggtgcctctgagctgtcagcttcacctgcaggctcacctgccagggccactctccccaagaagagtttgttcctccaacaatgcgtgtgcttgtttttgttgtgcagacagagttgtccccagtgttacacaatctcaaagagtaaccagagctcccttgtgtcccatacgcaatcctagttggagaaccatccatagataatcttaagaaacacttacacttctcttccttacagtcttctgggagtaaagaataagtgaaaaactgacagcgaatcatctttgtgcaagtctcttggcaaacattcactcctttaacaaaagtcacattcaattcttctcctccaaagtcaactcccgggtaaattttagaatggcagggttcaggtaaagttcttttgcaggttaaaaggctatatccagatatggtgttttcttgaggagtagaggaacttggtgtgccactttcagatgttttaagaagacaaacatttctttgtgactcgattttccatacatttgtatagaatgtaaagaagaggcagttggggtgataggtgcagatggtccgacacacaaaagcatctggagtgagaaccctggcaacatccacatctgagaacgcaagatgctggaagatgttcatgtggcaaccaatttctgaaagggcacagggcttcagtgagaatccagattccacgttactcagcacctttatagcggtaggtgttcctccgggactgtactttaataggcaattgttccggtactctgccttgtgaaatgtttgcgtggcatatgaaaaaaactggcagcgaatgttactggtgcaccttttttggcattcttcaacactgctaaccttagacacattaaaattgactcctctcatatcaactcctttataaatgtctcgatggcaagcacttatttgatgaccacattgcttcaaggaatgtccagaaactgcacctgttcgatgtacttttggcagggttcctgtaacactatctttcaagaagcaaccaaaccttttctccatgtcattgattgaacttgctggaagaaaactgaatagcaaacaccttgggtggaatgtgcacctcatctggcagtattgggcatttggggtgtacatggaagctacatccccacctctgaagaaggcgttttcatagagttgagtcagacatccacaggaaactgtagcaaacaaggaaatgaaataagttgcttgcttgaataaaatcattctgaaaacacaattgcttcttggaggtgagtctcttgtcacttaaaaatgaacggtcttcaagctgttct

SEQ ID NO: 3 - DNA, 2472 bp, Mus musculus
  source 1..2472: mol_type = genomic DNA
agaccgccctcggtgccatattcagagggcttgaagaccatcttcatgtgaagactccctctcctccagaaccacaacgtgaccatccttccaggatgattttattcaaccgagtgggttattttgtttccttgtttgctaccgtctcctgtgggtgtatgactcaactgtataaaaataccttcttcagaggtggggatctagctgccatctacaccccagatgcccagtactgtcagaagatgtgcacttttcaccccaggtgcctgctgttcagctttctcgccgtgactccacccaaagagacaaataaacggtttggttgcttcatgaaagagagcattacagggactttgccaagaatacaccggacaggggccatttctggtcattctttaaagcagtgtggccatcaaataagtgcttgccaccgagacatatacaaaggacttgatatgagagggtccaactttaatatctctaagaccgacaatattgaagaatgccagaaactgtgcacaaataattttcactgccaatttttcacatatgctacaagtgcattttacagaccagagtaccggaagaagtgcctgctgaagcacagtgcaagcggaacacccaccagcataaagtcagcggacaacctggtgtctggattctcactgaagtcctgtgcgctttcggagataggttgccccatggatattttccagcactctgcctttgcagacctgaatgtaagccaggtcatcacccccgatgcctttgtgtgtcgcaccatctgcaccttccatcccaactgccttttcttcacgttctacacgaatgaatgggagacagaatcacagagaaatgtttgttttcttaagacgtctaaaagtggaagaccaagtccccctattcctcaagaaaacgctatatctggatatagtctcctcacctgcagaaaaactcgccctgaaccctgccattccaaaatttactctggagttgactttgaaggggaagaactgaatgtgaccttcgtgcaaggagcagatgtctgccaagagacttgtacaaagacaatccgctgccagttttttatttactccttactcccccaagactgcaaggaggaggggtgtaaatgttccttaaggttatccacagatggctccccaactaggatcacctatggcatgcaggggagctccggttattctctgagattgtgtaaacttgtggacagccctgactgtacaacaaaaataaatgcacgtattgtgggaggaacaaacgcttctttaggggagtggccatggcaggtcagcctgcaagtgaagctggtatctcagacccatttgtgtggagggtccatcattggtcgccaatgggtactgacagctgcccattgctttgatggaattccctatccagatgtgtggcgtatatatggcggaattcttagtctgtccgagattacgaaagaaacgccttcctcgagaataaaggagcttattattcatcaggaatacaaagtctcagaaggcaattatgatattgccttaataaagcttcagacgcccctgaattatactgaattccaaaaaccaatatgcctgccttccaaagctgacacaaatacaatttataccaactgttgggtgactggatggggctacacgaaggaacaaggtgaaacgcaaaatattctacaaaaggctactattcctttggtaccaaatgaagaatgccagaaaaaatacagagattatgttataaacaagcagatgatctgtgctggctacaaagaaggcggaacagacgcttgtaagggagattccggtggccccttagtctgtaaacacagtggacggtggcagttggtgggtatcaccagctggggtgaaggctgcgcccgcaaggaccaaccaggagtctacaccaaagtttctgagtacatggactggatattggagaagacacagagcagtgatgtaagagctctggagacatcttcagcctgaggaggctgggtaccaaggaggaagaacccagctggctttaccacctgccctcaaggcaaactagagctccaggattctcggctgtaaaatgttgataatggtgtctacctcacatccgtatcattggattgaaaattcaagtgtagatatagttgctgaagacagcgttttgctcaagtgtgtttcctgccttgagtcacaggagctccaatgggagcattacaaagatcaccaagcttgttaggaaagagaatgatcaaagggttttattaggtaatgaaatgtctagatgtgatgcaattgaaaaaaagaccccagattctagcacagtccttgggaccattctcatgtaactgttgactctggacctcagcagatctcagagttacctgtccacttctgacatttgtttattagagcctgatgctattctttcaagtggagcaaaaaaaaaaaaaaa

SEQ ID NO: 4 - DNA, 2472 bp, Mus musculus
  source 1..2472: mol_type = genomic DNA
tttttttttttttttgctccacttgaaagaatagcatcaggctctaataaacaaatgtcagaagtggacaggtaactctgagatctgctgaggtccagagtcaacagttacatgagaatggtcccaaggactgtgctagaatctggggtctttttttcaattgcatcacatctagacatttcattacctaataaaaccctttgatcattctctttcctaacaagcttggtgatctttgtaatgctcccattggagctcctgtgactcaaggcaggaaacacacttgagcaaaacgctgtcttcagcaactatatctacacttgaattttcaatccaatgatacggatgtgaggtagacaccattatcaacattttacagccgagaatcctggagctctagtttgccttgagggcaggtggtaaagccagctgggttcttcctccttggtacccagcctcctcaggctgaagatgtctccagagctcttacatcactgctctgtgtcttctccaatatccagtccatgtactcagaaactttggtgtagactcctggttggtccttgcgggcgcagccttcaccccagctggtgatacccaccaactgccaccgtccactgtgtttacagactaaggggccaccggaatctcccttacaagcgtctgttccgccttctttgtagccagcacagatcatctgcttgtttataacataatctctgtattttttctggcattcttcatttggtaccaaaggaatagtagccttttgtagaatattttgcgtttcaccttgttccttcgtgtagccccatccagtcacccaacagttggtataaattgtatttgtgtcagctttggaaggcaggcatattggtttttggaattcagtataattcaggggcgtctgaagctttattaaggcaatatcataattgccttctgagactttgtattcctgatgaataataagctcctttattctcgaggaaggcgtttctttcgtaatctcggacagactaagaattccgccatatatacgccacacatctggatagggaattccatcaaagcaatgggcagctgtcagtacccattggcgaccaatgatggaccctccacacaaatgggtctgagataccagcttcacttgcaggctgacctgccatggccactcccctaaagaagcgtttgttcctcccacaatacgtgcatttatttttgttgtacagtcagggctgtccacaagtttacacaatctcagagaataaccggagctcccctgcatgccataggtgatcctagttggggagccatctgtggataaccttaaggaacatttacacccctcctccttgcagtcttgggggagtaaggagtaaataaaaaactggcagcggattgtctttgtacaagtctcttggcagacatctgctccttgcacgaaggtcacattcagttcttccccttcaaagtcaactccagagtaaattttggaatggcagggttcagggcgagtttttctgcaggtgaggagactatatccagatatagcgttttcttgaggaatagggggacttggtcttccacttttagacgtcttaagaaaacaaacatttctctgtgattctgtctcccattcattcgtgtagaacgtgaagaaaaggcagttgggatggaaggtgcagatggtgcgacacacaaaggcatcgggggtgatgacctggcttacattcaggtctgcaaaggcagagtgctggaaaatatccatggggcaacctatctccgaaagcgcacaggacttcagtgagaatccagacaccaggttgtccgctgactttatgctggtgggtgttccgcttgcactgtgcttcagcaggcacttcttccggtactctggtctgtaaaatgcacttgtagcatatgtgaaaaattggcagtgaaaattatttgtgcacagtttctggcattcttcaatattgtcggtcttagagatattaaagttggaccctctcatatcaagtcctttgtatatgtctcggtggcaagcacttatttgatggccacactgctttaaagaatgaccagaaatggcccctgtccggtgtattcttggcaaagtccctgtaatgctctctttcatgaagcaaccaaaccgtttatttgtctctttgggtggagtcacggcgagaaagctgaacagcaggcacctggggtgaaaagtgcacatcttctgacagtactgggcatctggggtgtagatggcagctagatccccacctctgaagaaggtatttttatacagttgagtcatacacccacaggagacggtagcaaacaaggaaacaaaataacccactcggttgaataaaatcatcctggaaggatggtcacgttgtggttctggaggagagggagtcttcacatgaagatggtcttcaagccctctgaatatggcaccgagggcggtct

SEQ ID NO: 5 - DNA, 2513 bp, Rattus norvegicus
  source 1..2513: mol_type = genomic DNA
tgaagactagcttcatgtgaagactccttctcctccagcagcacaaagcaaccatccttccaggatgattttattcaaacaagtgggttattttgtttccttgttcgctacagtttcctgtgggtgtctgtcacaactgtatgcaaataccttcttcagaggtggggatctggctgccatctacaccccggatgcccagcactgtcagaagatgtgcacgtttcaccccaggtgcctgctcttcagcttccttgccgtgagtccaaccaaggagacagataaaaggtttgggtgcttcatgaaagagagcattacagggactttgccaagaatacaccggacaggggccatttctggtcattctttaaaacagtgtggccatcaattaagtgcttgccaccaagacatatacgaaggactggatatgagagggtccaactttaatatatctaagaccgacagtattgaagaatgccagaaactgtgcacaaataatattcactgccaatttttcacatatgctacaaaagcatttcacagaccagagtacaggaagagttgcctgctgaagcgcagttcaagtggaacgcccaccagtataaagccagtggacaacctggtgtctggattctcactgaagtcctgtgctctctcagagatcggttgccccatggatattttccagcactttgcctttgcagacctgaatgtaagccatgtcgtcacccccgatgccttcgtgtgtcgcaccgtttgcaccttccatcccaactgcctcttcttcacattctacacgaatgagtgggagacggaatcacagaggaatgtttgttttcttaagacatctaaaagtggaagaccaagtccccctattattcaagaaaatgctgtatctggatacagtctcttcacctgcagaaaagctcgccctgaaccctgccatttcaagatttactctggagttgccttcgaaggggaagaactgaacgcgaccttcgtgcagggagcagatgcgtgccaagagacttgtacaaagaccatccgctgtcagttttttacttactcattgcttccccaagactgcaaggcagaggggtgtaaatgttccttaaggttatccacggatggctctccaactaggatcacctatgaggcacaggggagctctggttattctctgagactgtgtaaagttgtggagagctctgactgtacgacaaaaataaatgcacgtattgtgggaggaacaaactcttctttaggagagtggccatggcaggtcagcctgcaagtaaagttggtttctcagaatcatatgtgtggagggtccatcattggacgccaatggatactgacggctgcccattgctttgatgggattccctatccagacgtgtggcgtatatatggcgggattcttaatctgtcagagattacaaacaaaacgcctttctcaagtataaaggagcttattattcatcagaaatacaaaatgtcagaaggcagttacgatattgccttaataaagcttcagacaccgttgaattatactgaattccaaaaaccaatatgcctgccttccaaagctgacacaaatacaatttataccaactgctgggtgactggatggggctacacaaaggaacgaggtgagacccaaaatattctacaaaaggcaactattcccttggtaccaaatgaagaatgccagaaaaaatatagagattatgttataaccaagcagatgatctgtgctggctacaaagaaggtggaatagatgcttgtaagggagattccggtggccccttagtttgcaaacatagtggaaggtggcagttggtgggtatcaccagctggggcgaaggctgtgcccgcaaggagcaaccaggagtctacaccaaagttgctgagtacattgactggatattggagaagatacagagcagcaaggaaagagctctggagacatctccagcatgaggaggctgggtactgatggggaagagcccagctggcaccagctttaccacctgccctcaagtcctactagagctccagagttctcttctgcaaaatgtcgatagtggtgtctacctcgcatccttaccataggattaaaagtccaaatgtagacacagttgctaaagacagcgccatgctcaagcgtgcttcctgccttgagcaacaggaacgccaatgagaactatccaaagattaccaagcctgtttggaaataaaatggtcaaaggatttttattaggtagtgaaattaggtagttgtccttggaaccattctcatgtaactgttgactctggacctcagcagatcacagttaccttctgtccacttctgacatttgtgtactggaacctgatgctgttcttccacttggagcaaagaactgagaaacctggttctatccattgggaaaaagagatctttgtaacatttcctttacaataaaaagatgttctacttggacttgaaaaaaaaaaaaaaaaaaaaaaaaaa

SEQ ID NO: 6 - DNA, 2513 bp, Rattus norvegicus
  source 1..2513: mol_type = genomic DNA
ttttttttttttttttttttttttttcaagtccaagtagaacatctttttattgtaaaggaaatgttacaaagatctctttttcccaatggatagaaccaggtttctcagttctttgctccaagtggaagaacagcatcaggttccagtacacaaatgtcagaagtggacagaaggtaactgtgatctgctgaggtccagagtcaacagttacatgagaatggttccaaggacaactacctaatttcactacctaataaaaatcctttgaccattttatttccaaacaggcttggtaatctttggatagttctcattggcgttcctgttgctcaaggcaggaagcacgcttgagcatggcgctgtctttagcaactgtgtctacatttggacttttaatcctatggtaaggatgcgaggtagacaccactatcgacattttgcagaagagaactctggagctctagtaggacttgagggcaggtggtaaagctggtgccagctgggctcttccccatcagtacccagcctcctcatgctggagatgtctccagagctctttccttgctgctctgtatcttctccaatatccagtcaatgtactcagcaactttggtgtagactcctggttgctccttgcgggcacagccttcgccccagctggtgatacccaccaactgccaccttccactatgtttgcaaactaaggggccaccggaatctcccttacaagcatctattccaccttctttgtagccagcacagatcatctgcttggttataacataatctctatattttttctggcattcttcatttggtaccaagggaatagttgccttttgtagaatattttgggtctcacctcgttcctttgtgtagccccatccagtcacccagcagttggtataaattgtatttgtgtcagctttggaaggcaggcatattggtttttggaattcagtataattcaacggtgtctgaagctttattaaggcaatatcgtaactgccttctgacattttgtatttctgatgaataataagctcctttatacttgagaaaggcgttttgtttgtaatctctgacagattaagaatcccgccatatatacgccacacgtctggatagggaatcccatcaaagcaatgggcagccgtcagtatccattggcgtccaatgatggaccctccacacatatgattctgagaaaccaactttacttgcaggctgacctgccatggccactctcctaaagaagagtttgttcctcccacaatacgtgcatttatttttgtcgtacagtcagagctctccacaactttacacagtctcagagaataaccagagctcccctgtgcctcataggtgatcctagttggagagccatccgtggataaccttaaggaacatttacacccctctgccttgcagtcttggggaagcaatgagtaagtaaaaaactgacagcggatggtctttgtacaagtctcttggcacgcatctgctccctgcacgaaggtcgcgttcagttcttccccttcgaaggcaactccagagtaaatcttgaaatggcagggttcagggcgagcttttctgcaggtgaagagactgtatccagatacagcattttcttgaataatagggggacttggtcttccacttttagatgtcttaagaaaacaaacattcctctgtgattccgtctcccactcattcgtgtagaatgtgaagaagaggcagttgggatggaaggtgcaaacggtgcgacacacgaaggcatcgggggtgacgacatggcttacattcaggtctgcaaaggcaaagtgctggaaaatatccatggggcaaccgatctctgagagagcacaggacttcagtgagaatccagacaccaggttgtccactggctttatactggtgggcgttccacttgaactgcgcttcagcaggcaactcttcctgtactctggtctgtgaaatgcttttgtagcatatgtgaaaaattggcagtgaatattatttgtgcacagtttctggcattcttcaatactgtcggtcttagatatattaaagttggaccctctcatatccagtccttcgtatatgtcttggtggcaagcacttaattgatggccacactgttttaaagaatgaccagaaatggcccctgtccggtgtattcttggcaaagtccctgtaatgctctctttcatgaagcacccaaaccttttatctgtctccttggttggactcacggcaaggaagctgaagagcaggcacctggggtgaaacgtgcacatcttctgacagtgctgggcatccggggtgtagatggcagccagatccccacctctgaagaaggtatttgcatacagttgtgacagacacccacaggaaactgtagcgaacaaggaaacaaaataacccacttgtttgaataaaatcatcctggaaggatggttgctttgtgctgctggaggagaaggagtcttcacatgaagctagtcttca

SEQ ID NO: 7 - DNA, 2115 bp, Macaca fascicularis
  source 1..2115: mol_type = genomic DNA
tttctttgttcttcccatttccatattcataactcttttctcatcttctccacgtgagtttgtgaactagaaattggatagtcattctctgatcctacatgttaaacttgtagagaaaacccagattgtatgtgaggatcatcatcttaaaagtggaggtttggctgcttcttgaaagatagtgttacaggaaccttgccaaaagtacgtcgagcaggtgcaatttctggacattccttaaagcagtgtggtcatcaaataagtgcttgccaccgagacatttataaaggaattgatatgagaggagtcaattttaatgtatctaaggttagcagtgttgaagaatgccaaaaaaggtgcaccaataacattcgctgccaatttttttcatatgccacacaaacatttcacaatgcagagtaccggaacacttgcctcttaaagcacagtcccggaggaacgcctaccactataaaggtgctgaataacgtggaatctggattctcactgaagccttgtgccctttcagaaattggttgtcacatgaacatcttccagcatcttgccttctcggatgtggatgttgccagagttctcgccccagatgcttttgtgtgtcgaaccatctgcacctatcatcccagctgcctcttctttacgttctatacgaatgcatggaagatcgagtcacaaagaaatgtttgttttcttaaaacatctgaaagtggcacaccaagttcctctactcctcaagaaaacaccacatctggatacagccttttaacctgcaaaagaactttacctgaaccctgccattctaaaatttacccgggagttgactttggaggagaagaattgaatgtgactttcgttaaaggagtgaatgtttgccaagagacttgtacaaagatgattcgctgtcagtttttcacttattctttactcccagaagactgtaaggaggagaagtgtaagtgtttcttaagattatcttcggatggttctccaactaggattacatatgggacacaagggagctctggttactctttgagattgtgtaacactggggacagctctgtctgcacaacaaaaacaagctcacgcattgttggaggaacaaactcttcttggggagagtggccctggcaagtgagcctgcaggtgaagctgatggctcagaggcacctgtgtggagggtcactcataggacaccagtgggtcctcactgctgcccactgctttgatgggcttcccttaccggatgtttggcgcatttatagtggcattttaaatctgtcagacattacaaaagaaacacctttctcacaaataaaagagatcattattcaccaaaactatagaatctcagaagggaatcatgatatcgccttaataaaactccaggctcctttgaattacactgaattccaaaaaccaatatgcctaccttccaaaggtgacacaaacacaatttataccaactgttgggtaactggatggggcttctcgaaggaaaaaggtgaaatccaagatattctacaaaaggtaaatattcctttggtaacaaatgaagaatgccagaaaagatatcaagattataaaataacccaacggatggtctgtgctggctataaagaagggggaaaagatgcttgtaagggagattcagggggtcccttagcttgcaaacacaatggaatgtggcgtttggtgggcatcaccagctggggcgaaggctgtgcccgcagggagcaacctggtgtctacaccaaagtcgctgagtacatggactggattttagagaaaacacagagcagtgatggaaacgctcggatgcaggcgccagcatgaggagcagcccagagtcttggcgagttttacaacctgggttcaagtcaaattctgagcctgggggtcctcatctgcaaagcatggagagtggcatctactttgcatcctgtcataaggacaaaagacagtgcactcagagctgctgaggacaatgttttgctgaagccagctttcagcattcagtaactgggagctgataatgtgaagtcgcaaccgagatctccatgattgtgtgtcgtaaaataaaatggtaaaagatca

SEQ ID NO: 8 - DNA, 2115 bp, Macaca fascicularis
  source 1..2115: mol_type = genomic DNA
tgatcttttaccattttattttacgacacacaatcatggagatctcggttgcgacttcacattatcagctcccagttactgaatgctgaaagctggcttcagcaaaacattgtcctcagcagctctgagtgcactgtcttttgtccttatgacaggatgcaaagtagatgccactctccatgctttgcagatgaggacccccaggctcagaatttgacttgaacccaggttgtaaaactcgccaagactctgggctgctcctcatgctggcgcctgcatccgagcgtttccatcactgctctgtgttttctctaaaatccagtccatgtactcagcgactttggtgtagacaccaggttgctccctgcgggcacagccttcgccccagctggtgatgcccaccaaacgccacattccattgtgtttgcaagctaagggaccccctgaatctcccttacaagcatcttttcccccttctttatagccagcacagaccatccgttgggttattttataatcttgatatcttttctggcattcttcatttgttaccaaaggaatatttaccttttgtagaatatcttggatttcacctttttccttcgagaagccccatccagttacccaacagttggtataaattgtgtttgtgtcacctttggaaggtaggcatattggtttttggaattcagtgtaattcaaaggagcctggagttttattaaggcgatatcatgattcccttctgagattctatagttttggtgaataatgatctcttttatttgtgagaaaggtgtttcttttgtaatgtctgacagatttaaaatgccactataaatgcgccaaacatccggtaagggaagcccatcaaagcagtgggcagcagtgaggacccactggtgtcctatgagtgaccctccacacaggtgcctctgagccatcagcttcacctgcaggctcacttgccagggccactctccccaagaagagtttgttcctccaacaatgcgtgagcttgtttttgttgtgcagacagagctgtccccagtgttacacaatctcaaagagtaaccagagctcccttgtgtcccatatgtaatcctagttggagaaccatccgaagataatcttaagaaacacttacacttctcctccttacagtcttctgggagtaaagaataagtgaaaaactgacagcgaatcatctttgtacaagtctcttggcaaacattcactcctttaacgaaagtcacattcaattcttctcctccaaagtcaactcccgggtaaattttagaatggcagggttcaggtaaagttcttttgcaggttaaaaggctgtatccagatgtggtgttttcttgaggagtagaggaacttggtgtgccactttcagatgttttaagaaaacaaacatttctttgtgactcgatcttccatgcattcgtatagaacgtaaagaagaggcagctgggatgataggtgcagatggttcgacacacaaaagcatctggggcgagaactctggcaacatccacatccgagaaggcaagatgctggaagatgttcatgtgacaaccaatttctgaaagggcacaaggcttcagtgagaatccagattccacgttattcagcacctttatagtggtaggcgttcctccgggactgtgctttaagaggcaagtgttccggtactctgcattgtgaaatgtttgtgtggcatatgaaaaaaattggcagcgaatgttattggtgcaccttttttggcattcttcaacactgctaaccttagatacattaaaattgactcctctcatatcaattcctttataaatgtctcggtggcaagcacttatttgatgaccacactgctttaaggaatgtccagaaattgcacctgctcgacgtacttttggcaaggttcctgtaacactatctttcaagaagcagccaaacctccacttttaagatgatgatcctcacatacaatctgggttttctctacaagtttaacatgtaggatcagagaatgactatccaatttctagttcacaaactcacgtggagaagatgagaaaagagttatgaatatggaaatgggaagaacaaagaaa

SEQ ID NO: 9 - DNA, 2060 bp, Homo sapiens
  source 1..2060: mol_type = genomic DNA
ctattgatctggactcctggataggcagctggaccaacggacggatgccatgagggctctgctgctcctggggttcctgctggtgagcttggagtcaacactttcgattccaccttgggaagcccccaaggagcataagtacaaagctgaagagcacacagtcgttctcactgtcaccggggagccctgccacttccccttccagtaccaccggcagctgtaccacaaatgtacccacaagggccggccaggccctcagccctggtgtgctaccacccccaactttgatcaggaccagcgatggggatactgtttggagcccaagaaagtgaaagaccactgcagcaaacacagcccctgccagaaaggagggacctgtgtgaacatgccaagcggcccccactgtctctgtccacaacacctcactggaaaccactgccagaaagagaagtgctttgagcctcagcttctccggtttttccacaagaatgagatatggtatagaactgagcaagcagctgtggccagatgccagtgcaagggtcctgatgcccactgccagcggctggccagccaggcctgccgcaccaacccgtgcctccatgggggtcgctgcctagaggtggagggccaccgcctgtgccactgcccggtgggctacaccggagccttctgcgacgtggacaccaaggcaagctgctatgatggccgcgggctcagctaccgcggcctggccaggaccacgctctcgggtgcgccctgtcagccgtgggcctcggaggccacctaccggaacgtgactgccgagcaagcgcggaactggggactgggcggccacgccttctgccggaacccggacaacgacatccgcccgtggtgcttcgtgctgaaccgcgaccggctgagctgggagtactgcgacctggcacagtgccagaccccaacccaggcggcgcctccgaccccggtgtcccctaggcttcatgtcccactcatgcccgcgcagccggcaccgccgaagcctcagcccacgacccggaccccgcctcagtcccagaccccgggagccttgccggcgaagcgggagcagccgccttccctgaccaggaacggcccactgagctgcgggcagcggctccgcaagagtctgtcttcgatgacccgcgtcgttggcgggctggtggcgctacgcggggcgcacccctacatcgccgcgctgtactggggccacagtttctgcgccggcagcctcatcgccccctgctgggtgctgacggccgctcactgcctgcaggaccggcccgcacccgaggatctgacggtggtgctcggccaggaacgccgtaaccacagctgtgagccgtgccagacgttggccgtgcgctcctaccgcttgcacgaggccttctcgcccgtcagctaccagcacgacctggctctgttgcgccttcaggaggatgcggacggcagctgcgcgctcctgtcgccttacgttcagccggtgtgcctgccaagcggcgccgcgcgaccctccgagaccacgctctgccaggtggccggctggggccaccagttcgagggggcggaggaatatgccagcttcctgcaggaggcgcaggtaccgttcctctccctggagcgctgctcagccccggacgtgcacggatcctccatcctccccggcatgctctgcgcagggttcctcgagggcggcaccgatgcgtgccagggtgattccggaggcccgctggtgtgtgaggaccaagctgcagagcgccggctcaccctgcaaggcatcatcagctggggatcgggctgtggtgaccgcaacaagccaggcgtctacaccgatgtggcctactacctggcctggatccgggagcacaccgtttcctgattgctcagggactcatctttccctccttggtgattccgcagtgagagagtggctggggcatggaaggcaagattgtgtcccattcccccagtgcggccagctccgcgccaggatggcgcaggaactcaataaagtgctttgaaaatgctgagaaaaaaaaaaa

SEQ ID NO: 10 - DNA, 2060 bp, Homo sapiens
  source 1..2060: mol_type = genomic DNA
tttttttttttctcagcattttcaaagcactttattgagttcctgcgccatcctggcgcggagctggccgcactgggggaatgggacacaatcttgccttccatgccccagccactctctcactgcggaatcaccaaggagggaaagatgagtccctgagcaatcaggaaacggtgtgctcccggatccaggccaggtagtaggccacatcggtgtagacgcctggcttgttgcggtcaccacagcccgatccccagctgatgatgccttgcagggtgagccggcgctctgcagcttggtcctcacacaccagcgggcctccggaatcaccctggcacgcatcggtgccgccctcgaggaaccctgcgcagagcatgccggggaggatggaggatccgtgcacgtccggggctgagcagcgctccagggagaggaacggtacctgcgcctcctgcaggaagctggcatattcctccgccccctcgaactggtggccccagccggccacctggcagagcgtggtctcggagggtcgcgcggcgccgcttggcaggcacaccggctgaacgtaaggcgacaggagcgcgcagctgccgtccgcatcctcctgaaggcgcaacagagccaggtcgtgctggtagctgacgggcgagaaggcctcgtgcaagcggtaggagcgcacggccaacgtctggcacggctcacagctgtggttacggcgttcctggccgagcaccaccgtcagatcctcgggtgcgggccggtcctgcaggcagtgagcggccgtcagcacccagcagggggcgatgaggctgccggcgcagaaactgtggccccagtacagcgcggcgatgtaggggtgcgccccgcgtagcgccaccagcccgccaacgacgcgggtcatcgaagacagactcttgcggagccgctgcccgcagctcagtgggccgttcctggtcagggaaggcggctgctcccgcttcgccggcaaggctcccggggtctgggactgaggcggggtccgggtcgtgggctgaggcttcggcggtgccggctgcgcgggcatgagtgggacatgaagcctaggggacaccggggtcggaggcgccgcctgggttggggtctggcactgtgccaggtcgcagtactcccagctcagccggtcgcggttcagcacgaagcaccacgggcggatgtcgttgtccgggttccggcagaaggcgtggccgcccagtccccagttccgcgcttgctcggcagtcacgttccggtaggtggcctccgaggcccacggctgacagggcgcacccgagagcgtggtcctggccaggccgcggtagctgagcccgcggccatcatagcagcttgccttggtgtccacgtcgcagaaggctccggtgtagcccaccgggcagtggcacaggcggtggccctccacctctaggcagcgacccccatggaggcacgggttggtgcggcaggcctggctggccagccgctggcagtgggcatcaggacccttgcactggcatctggccacagctgcttgctcagttctataccatatctcattcttgtggaaaaaccggagaagctgaggctcaaagcacttctctttctggcagtggtttccagtgaggtgttgtggacagagacagtgggggccgcttggcatgttcacacaggtccctcctttctggcaggggctgtgtttgctgcagtggtctttcactttcttgggctccaaacagtatccccatcgctggtcctgatcaaagttgggggtggtagcacaccagggctgagggcctggccggcccttgtgggtacatttgtggtacagctgccggtggtactggaaggggaagtggcagggctccccggtgacagtgagaacgactgtgtgctcttcagctttgtacttatgctccttgggggcttcccaaggtggaatcgaaagtgttgactccaagctcaccagcaggaaccccaggagcagcagagccctcatggcatccgtccgttggtccagctgcctatccaggagtccagatcaatag

SEQ ID NO: 11 - DNA, 2198 bp, Macaca fascicularis
  source 1..2198: mol_type = genomic DNA
ttcctgactcaagtccagagcttccctaccttgcttctaaggtgaccaaggaagtcagtccacttggctttccataaacagcctgtgccccaccaggctcaggggggcagcttgaccaatccctatttccaagacctttggccaaccctattgatctggactcctgggcagacagttggaccaacggacagacgccatgagggctctgctgctcatggggttcctgctggtgagcctggagtcaacactttcgattccaccttggaaagcgcccaaggagcataagtacaaagctgaagagcacacagtcgttctcactgtcaccggggagccctgccacttccccttccagtaccaccggcggctgtaccacaaatgtacccacaagggccggccaggccctcagacctggtgtgctaccacccctaactttgatgaggaccagcgctggggatactgtgtggagcccaagaaagtgaaagaccactgcagtaaacacagcccctgccagaaaggggggacctgtgtgaacacgctgagtggcacccactgtctctgtccacaacacctcactgggaaccactgccagagagagaagtgctttgagcctcagcttctccggtttttccacgagaatgagatatggtatagatctgagcaagcagctgtggccagatgccagtgcaagggtcctgatgcccactgccagcggctggccagccaggcctgccgcaccaacccgtgcctccatgggggtcgctgcctagaggtggagggccaccgcctgtgccactgccccgtgggctacaccggacccttctgcgacttggacaccaaggcgagctgctatgatggccgcgggctcagctaccgcggcctggccaggaccacgctctcgggtgcgccctgtcagccgtggacctcggaggccacctactggaacgtgacggccgagcaagcgcggaactggggactgggcggccacgccttctgccggaacccggacaacgacatccgcccgtggtgcttcgtgctgatcggcgacaggctaagctgggagtactgcgacgtggcacagtgccaggccccaacccaggcggcgcctccgacgccggtgtcccctgggcttcatgtcccactcatgcccccgcagccggcaccgccgaagcttcagcccacgacccggaccccgcctcagtcccagaccccgggagccttgccagtgaagcgggagcagccgcctcgcctgacccggaacggctcagtgagctgcgggcagcggctccgcaagagtctgtcttcgatgacccgcgtcgttggcgggctggtggcgctacgcggggcgcacccctacatcgccgcgctgtactggggccacagtttctgcgccggcagcctcatcgccccctgctgggtgctgacggccgctcactgcctgcaggaccggccggcacccgaggatctgacggtagtactcggccaggaacgccataaccacagctgtgaacagtgccagactctggccgtgcgctcctaccgcttgcacgaggccttctcgcccgacagctaccagcacgacctggctctgttgcgccttcaggaggatgcggacggcagctgcgcgctcctgtcgccttacgttcagccggtgtgcctgccaagcggcgccgcgcgaccctccgagcccgcgctctgccaggtggctggctggggccaccagttcgagggggcggaggaatattccagcttcctgcaggaggcgcaggtacccttcctctccctggagagctgctcagcaccggaggtgcacggagcctccatcctccccggcatgctctgcgcagggttcctcgagggcggcaccgatgcatgccagggtgattccggaggcccgctggtgtgtgaggaccaagccgcagagcgccggctcaccctgcaaggcatcatcagctggggatcgggctgtggtgaccgcaacaagccaggcgtctacaccgatgtggcctactacctggcctggatccgggagcacaccgcttcctgattgctcagggactcatctttccctcctcggtgattccgcagtgggagactggctggggcatggaaggcaaaattgtgtcccattcccccaatgcggccagctccgcgccaggatggcgcaggaactcaataaagtgctttgaaaatgctgagaa

SEQ ID NO: 12 - DNA, 2198 bp, Macaca fascicularis
  source 1..2198: mol_type = genomic DNA
ttctcagcattttcaaagcactttattgagttcctgcgccatcctggcgcggagctggccgcattgggggaatgggacacaattttgccttccatgccccagccagtctcccactgcggaatcaccgaggagggaaagatgagtccctgagcaatcaggaagcggtgtgctcccggatccaggccaggtagtaggccacatcggtgtagacgcctggcttgttgcggtcaccacagcccgatccccagctgatgatgccttgcagggtgagccggcgctctgcggcttggtcctcacacaccagcgggcctccggaatcaccctggcatgcatcggtgccgccctcgaggaaccctgcgcagagcatgccggggaggatggaggctccgtgcacctccggtgctgagcagctctccagggagaggaagggtacctgcgcctcctgcaggaagctggaatattcctccgccccctcgaactggtggccccagccagccacctggcagagcgcgggctcggagggtcgcgcggcgccgcttggcaggcacaccggctgaacgtaaggcgacaggagcgcgcagctgccgtccgcatcctcctgaaggcgcaacagagccaggtcgtgctggtagctgtcgggcgagaaggcctcgtgcaagcggtaggagcgcacggccagagtctggcactgttcacagctgtggttatggcgttcctggccgagtactaccgtcagatcctcgggtgccggccggtcctgcaggcagtgagcggccgtcagcacccagcagggggcgatgaggctgccggcgcagaaactgtggccccagtacagcgcggcgatgtaggggtgcgccccgcgtagcgccaccagcccgccaacgacgcgggtcatcgaagacagactcttgcggagccgctgcccgcagctcactgagccgttccgggtcaggcgaggcggctgctcccgcttcactggcaaggctcccggggtctgggactgaggcggggtccgggtcgtgggctgaagcttcggcggtgccggctgcgggggcatgagtgggacatgaagcccaggggacaccggcgtcggaggcgccgcctgggttggggcctggcactgtgccacgtcgcagtactcccagcttagcctgtcgccgatcagcacgaagcaccacgggcggatgtcgttgtccgggttccggcagaaggcgtggccgcccagtccccagttccgcgcttgctcggccgtcacgttccagtaggtggcctccgaggtccacggctgacagggcgcacccgagagcgtggtcctggccaggccgcggtagctgagcccgcggccatcatagcagctcgccttggtgtccaagtcgcagaagggtccggtgtagcccacggggcagtggcacaggcggtggccctccacctctaggcagcgacccccatggaggcacgggttggtgcggcaggcctggctggccagccgctggcagtgggcatcaggacccttgcactggcatctggccacagctgcttgctcagatctataccatatctcattctcgtggaaaaaccggagaagctgaggctcaaagcacttctctctctggcagtggttcccagtgaggtgttgtggacagagacagtgggtgccactcagcgtgttcacacaggtcccccctttctggcaggggctgtgtttactgcagtggtctttcactttcttgggctccacacagtatccccagcgctggtcctcatcaaagttaggggtggtagcacaccaggtctgagggcctggccggcccttgtgggtacatttgtggtacagccgccggtggtactggaaggggaagtggcagggctccccggtgacagtgagaacgactgtgtgctcttcagctttgtacttatgctccttgggcgctttccaaggtggaatcgaaagtgttgactccaggctcaccagcaggaaccccatgagcagcagagccctcatggcgtctgtccgttggtccaactgtctgcccaggagtccagatcaatagggttggccaaaggtcttggaaatagggattggtcaagctgcccccctgagcctggtggggcacaggctgtttatggaaagccaagtggactgacttccttggtcaccttagaagcaaggtagggaagctctggacttgagtcaggaa

SEQ ID NO: 13 - DNA, 1971 bp, Mus musculus
  source 1..1971: mol_type = genomic DNA
actcctgggcaggcagcggggccatcggcagacgccatgacggctctgttgttcctggggtctctgctgatgagtctggatctgacactttcggctccaccatggaaagactccaagaaatttaaggacgcacctgatgggcccacagtggttctcactgtggatgggaggctctgccattttccctttcagtaccaccgtcagctacaccacaaatgcatccacaaaaggcggccaggctcccgcccctggtgtgctaccacccccaactttgatgaagatcagcaatggggatactgcttggagcccaagaaagtgaaagaccattgcagcaaacacaacccgtgccacaaaggagggacatgtatcaacacccccaatgggccacactgtctctgccctgaacacctcactgggaaacattgccagaaagagaaatgctttgagcctcagcttctcaagttcttccacgagaatgagctatggtttagaacggggccaggaggtgtggccaggtgcgagtgcaaaggttctgaggctcactgcaagccggtggccagccaggcctgcagcatcaatccgtgccttaatgggggcagctgcctcctcgtggaggaccacccactgtgccgttgccctacaggctacactggatatttttgcgacttggacctttgggcgacctgctatgaaggcagggggctcagctaccggggccaggctggaactacgcaatcgggtgcgccatgtcagcggtggaccgtggaggccacctaccggaacatgactgagaagcaagcgctaagctggggcctgggccaccacgcattttgccggaacccagataatgacacacgtccatggtgcttcgtctggagtggcgacaggctgagctgggactattgcggcctggagcagtgccagacgccaacgtttgcacctctagttgtccctgagagtcaggaggagtccccgtcccaggcaccatctctgtcccatgcaccaaatgactcgaccgatcatcagacttctctgtccaagaccaacacgatgggctgcggacagaggttccgcaagggactgtcctcgttcatgcgcgtggtgggcggactagtggctctgcctgggtcgcacccctacatcgctgcactgtactggggtaacaacttctgcgcgggcagtctcatcgccccctgttgggtgctgaccgcggctcactgcctgcagaatcggccagcgcccgaggaactgacagtggtacttggtcaagatcgccacaaccagagctgcgagtggtgccagactctggctgtgcgctcctaccgccttcacgagggcttctcctccatcacctaccagcacgacttggctctgctgcgcctgcaggaaagcaaaaccaacagttgcgcgatcctgtcacctcacgttcagcctgtgtgtctacccagcggcgcggccccaccctctgagacagtgctctgcgaggtggccggctggggtcaccagttcgagggggctgaagaatactccaccttcctgcaggaggcacaggttccctttatcgccctggatcgctgctccaactctaacgtgcacggagacgccattctccctgggatgctttgcgctggcttcttggagggaggcaccgatgcctgccagggtgactccgggggccctctggtgtgtgaggaaggaactgcagaacatcagctcaccctgcgcggagtcatcagctggggctccggctgtggtgaccgcaacaagcccggagtctacacagacgtggccaactacctggcttggatccagaagcatattgcttcataactaaccaggctttatccttccctccttgtgtgctccttgggatgggacgatgaatgtggcatgctgggtcacagtgaagctagtgccccgacactgggggcacagaaactcaataaagtgctttgaaaacgttcctcagaa

SEQ ID NO: 14 - DNA, 1971 bp, Mus musculus
  source 1..1971: mol_type = genomic DNA
ttctgaggaacgttttcaaagcactttattgagtttctgtgcccccagtgtcggggcactagcttcactgtgacccagcatgccacattcatcgtcccatcccaaggagcacacaaggagggaaggataaagcctggttagttatgaagcaatatgcttctggatccaagccaggtagttggccacgtctgtgtagactccgggcttgttgcggtcaccacagccggagccccagctgatgactccgcgcagggtgagctgatgttctgcagttccttcctcacacaccagagggcccccggagtcaccctggcaggcatcggtgcctccctccaagaagccagcgcaaagcatcccagggagaatggcgtctccgtgcacgttagagttggagcagcgatccagggcgataaagggaacctgtgcctcctgcaggaaggtggagtattcttcagccccctcgaactggtgaccccagccggccacctcgcagagcactgtctcagagggtggggccgcgccgctgggtagacacacaggctgaacgtgaggtgacaggatcgcgcaactgttggttttgctttcctgcaggcgcagcagagccaagtcgtgctggtaggtgatggaggagaagccctcgtgaaggcggtaggagcgcacagccagagtctggcaccactcgcagctctggttgtggcgatcttgaccaagtaccactgtcagttcctcgggcgctggccgattctgcaggcagtgagccgcggtcagcacccaacagggggcgatgagactgcccgcgcagaagttgttaccccagtacagtgcagcgatgtaggggtgcgacccaggcagagccactagtccgcccaccacgcgcatgaacgaggacagtcccttgcggaacctctgtccgcagcccatcgtgttggtcttggacagagaagtctgatgatcggtcgagtcatttggtgcatgggacagagatggtgcctgggacggggactcctcctgactctcagggacaactagaggtgcaaacgttggcgtctggcactgctccaggccgcaatagtcccagctcagcctgtcgccactccagacgaagcaccatggacgtgtgtcattatctgggttccggcaaaatgcgtggtggcccaggccccagcttagcgcttgcttctcagtcatgttccggtaggtggcctccacggtccaccgctgacatggcgcacccgattgcgtagttccagcctggccccggtagctgagccccctgccttcatagcaggtcgcccaaaggtccaagtcgcaaaaatatccagtgtagcctgtagggcaacggcacagtgggtggtcctccacgaggaggcagctgcccccattaaggcacggattgatgctgcaggcctggctggccaccggcttgcagtgagcctcagaacctttgcactcgcacctggccacacctcctggccccgttctaaaccatagctcattctcgtggaagaacttgagaagctgaggctcaaagcatttctctttctggcaatgtttcccagtgaggtgttcagggcagagacagtgtggcccattgggggtgttgatacatgtccctcctttgtggcacgggttgtgtttgctgcaatggtctttcactttcttgggctccaagcagtatccccattgctgatcttcatcaaagttgggggtggtagcacaccaggggcgggagcctggccgccttttgtggatgcatttgtggtgtagctgacggtggtactgaaagggaaaatggcagagcctcccatccacagtgagaaccactgtgggcccatcaggtgcgtccttaaatttcttggagtctttccatggtggagccgaaagtgtcagatccagactcatcagcagagaccccaggaacaacagagccgtcatggcgtctgccgatggccccgctgcctgcccaggagt

SEQ ID NO: 15 - DNA, 2128 bp, Rattus norvegicus
  source 1..2128: mol_type = genomic DNA
caggaacccatctcggtactctgcttccaccagccttgccctgctcacgagggttcgacggcgctgttcttctgggctttctgtgaagtctgtgctcctcaggcccaggagggagcttaaccaatctccacctctgaggtttctgagacctttgcccacatctattgatccttactctggggcaggcagctgggccattggcggacgccatgacggctctgttgttcctggggtctctgctgatgagtctggacttgacactttcggcgccaccgtggaagtccaaggagttcaaggacggagctggcgatccctctgtggttctcactgtggacgggaagctctgccactttccctttcagtaccaccgtcgcctgtaccacaaatgcatccacaaaggacagccaggctccaggccctggtgtgctaccacccccaactttgacgaggaccagcaatggggatactgcttggagcccaagaaagtgaaagaccattgcagcaaacacagcccctgccacaaaggagggacgtgtgtcaacacccccaacggcccgcactgtctctgccctgaacacctcaccgggaaacattgccagagagagaaatgctttgagtctcagctcctcaagttcttccatgagaatgagatatggtttagaactgggccaggaggtgtggccaggtgccagtgcaaaggtcctcaggctgtttgcaagctgctgaccagtcaggtttgcagggtcaatccgtgccttaatggaggcacctgcctcctcgtggaggaccaccgactgtgccactgccctgcaggctatgccggacctttttgcgacttagaccttaaggcgacttgctacgaagacaggggtctcagctaccggggccaggctaaaactactctgtcgggtgcaccatgtcagcggtgggcctcggaggccacctaccggaacatgactgagacgcaagctctaagctggggcctgggccaccacgcattctgccggaacccagataatgacacacgtccatggtgctacgtctggagtggcgacaggctgagctgggactactgcgacctggaacagtgccagatgccaacgctcacatctccggtttcccctgagagtcacgacatgctgaagccccggcctcccatattgcagatgcctcagttcccgtctctgtccgatgcactagacaactcgacccgtaatcagaatgttgtgtccaggaccagtacggtggtctgcggacagaggtttcgcaagcgactgtcctcgctcaggcgcgtggtgggcggactagtggctctgcctggatcgcatccctacatcgctgcactgtactggggcgacagcttctgcgcaggcagtctcatcgacccctgctgggtgctgaccgctgctcactgcttgcagaaacggccagcgcccgaggaactgacagtggtacttggtcaagatcgccataaccagagctgcgagaggtgccagactctggctgtgcactcctaccgccttcacgagggcttctcttccaaaacctaccagcatgatttggctctgctgcgcctgcgggggaggaaaaacagctgcgcgatcttgtcgcctcatgtccagccggtgtgtctgcccagcagcgcggccccaccctctgagacagtgctctgcgaggtggccggctggggtcatcagttcgagggggctgaagaatacgccacctttctgcaggaggcacaggtacccttcatctccctggatcgctgctccagctctaacgtgcacggagacgccatcctgcctgggatgctttgtgctggcttcttggagggaggcgccgatgcctgtcagggtgactccgggggtcctctggtatgtgatgaaggagttacagagcgtcagctcaccctgcgaggagtcatcagctggggctccggctgtggtgaccggaacaagcccggggtctacactgacgtggccaattacctggattggatccaggagcatactgctttctaagtaaccagggtcggtccttgcgaagctagtggctgggccccagggacacagaaactcaataaagtgctttgaaaacgttaaaaaaaaaaaaaaaaaaaaaaaaaaaa

SEQ ID NO: 16 - DNA, 2128 bp, Rattus norvegicus
  source 1..2128: mol_type = genomic DNA
ttttttttttttttttttttttttttttaacgttttcaaagcactttattgagtttctgtgtccctggggcccagccactagcttcgcaaggaccgaccctggttacttagaaagcagtatgctcctggatccaatccaggtaattggccacgtcagtgtagaccccgggcttgttccggtcaccacagccggagccccagctgatgactcctcgcagggtgagctgacgctctgtaactccttcatcacataccagaggacccccggagtcaccctgacaggcatcggcgcctccctccaagaagccagcacaaagcatcccaggcaggatggcgtctccgtgcacgttagagctggagcagcgatccagggagatgaagggtacctgtgcctcctgcagaaaggtggcgtattcttcagccccctcgaactgatgaccccagccggccacctcgcagagcactgtctcagagggtggggccgcgctgctgggcagacacaccggctggacatgaggcgacaagatcgcgcagctgtttttcctcccccgcaggcgcagcagagccaaatcatgctggtaggttttggaagagaagccctcgtgaaggcggtaggagtgcacagccagagtctggcacctctcgcagctctggttatggcgatcttgaccaagtaccactgtcagttcctcgggcgctggccgtttctgcaagcagtgagcagcggtcagcacccagcaggggtcgatgagactgcctgcgcagaagctgtcgccccagtacagtgcagcgatgtagggatgcgatccaggcagagccactagtccgcccaccacgcgcctgagcgaggacagtcgcttgcgaaacctctgtccgcagaccaccgtactggtcctggacacaacattctgattacgggtcgagttgtctagtgcatcggacagagacgggaactgaggcatctgcaatatgggaggccggggcttcagcatgtcgtgactctcaggggaaaccggagatgtgagcgttggcatctggcactgttccaggtcgcagtagtcccagctcagcctgtcgccactccagacgtagcaccatggacgtgtgtcattatctgggttccggcagaatgcgtggtggcccaggccccagcttagagcttgcgtctcagtcatgttccggtaggtggcctccgaggcccaccgctgacatggtgcacccgacagagtagttttagcctggccccggtagctgagacccctgtcttcgtagcaagtcgccttaaggtctaagtcgcaaaaaggtccggcatagcctgcagggcagtggcacagtcggtggtcctccacgaggaggcaggtgcctccattaaggcacggattgaccctgcaaacctgactggtcagcagcttgcaaacagcctgaggacctttgcactggcacctggccacacctcctggcccagttctaaaccatatctcattctcatggaagaacttgaggagctgagactcaaagcatttctctctctggcaatgtttcccggtgaggtgttcagggcagagacagtgcgggccgttgggggtgttgacacacgtccctcctttgtggcaggggctgtgtttgctgcaatggtctttcactttcttgggctccaagcagtatccccattgctggtcctcgtcaaagttgggggtggtagcacaccagggcctggagcctggctgtcctttgtggatgcatttgtggtacaggcgacggtggtactgaaagggaaagtggcagagcttcccgtccacagtgagaaccacagagggatcgccagctccgtccttgaactccttggacttccacggtggcgccgaaagtgtcaagtccagactcatcagcagagaccccaggaacaacagagccgtcatggcgtccgccaatggcccagctgcctgccccagagtaaggatcaatagatgtgggcaaaggtctcagaaacctcagaggtggagattggttaagctccctcctgggcctgaggagcacagacttcacagaaagcccagaagaacagcgccgtcgaaccctcgtgagcagggcaaggctggtggaagcagagtaccgagatgggttcctg

SEQ ID NO: 17 - DNA, 2035 bp, Homo sapiens
  source 1..2035: mol_type = genomic DNA
agtgttgcaatgttctagctgtaaatatgtttggataacccagcagagccatttaacctttgggaacaaggcaactagcgtctggcagcaggaatccaaccagtgccctgagttctgaggcagagaggaggacagaagaaacaagaggctggagattgtcaaattcagtatcccagttggctcttgattcttggtgaaaccatccctcagctcctagagggagattgttagatcatgaaactaattaccatccttttcctctgctccaggctgctactaagtttaacccaggaatcacagtccgaggaaattgactgcaatgacaaggatttatttaaagctgtggatgctgctctgaagaaatataacagtcaaaaccaaagtaacaaccagtttgtattgtaccgcataactgaagccactaagacggttggctctgacacgttttattccttcaagtacgaaatcaaggagggggattgtcctgttcaaagtggcaaaacctggcaggactgtgagtacaaggatgctgcaaaagcagccactggagaatgcacggcaaccgtggggaagaggagcagtacgaaattctccgtggctacccagacctgccagattactccagccgagggccctgtggtgacagcccagtacgactgcctcggctgtgtgcatcctatatcaacgcagagcccagacctggagcccattctgagacacggcattcagtactttaacaacaacactcaacattcctccctcttcatgcttaatgaagtaaaacgggcccaaagacaggataccggtgaatgtacagataatgcatacatcgatattcagctacgaattgcttccttctcacagaactgtgacatttatccagggaaggattttgtacaaccacctaccaagatttgcgtgggctgccccagagatatacccaccaacagcccagagctggaggagacactgactcacaccatcacaaagcttaatgcagagaataacgcaactttctatttcaagattgacaatgtgaaaaaagcaagagtacaggtggtggctggcaagaaatattttattgacttcgtggccagggaaaccacatgttccaaggaaagtaatgaagagttgaccgaaagctgtgagaccaaaaaacttggccaaagcctagattgcaacgctgaagtttatgtggtaccctgggagaaaaaaatttaccctactgtcaactgtcaaccactgggaatgatctcactgatgaaaaggcctccaggtttttcacctttccgatcatcacgaataggggaaataaaagaagaaacaactagtcacctaaggtcctgcgagtacaagggtcgacccccaaaggcaggggcagagccagcatctgagagggaggtctcttgaccaatgggcagaatcttcactccaggcacatagccccaaccacctctgccagcaaccttgagaggaaggacaagaagaaagatgggatagaatttaaatagagaagaatgccattttatcactctgcctctgggtgaaataaagatcagtcttgatgttctaactctaattcacagtggtctcctttcagccctacccattctgcagcaaattccagctggtcagagagtcagtgctgtggctctgccatggaggctcataacccaacactggaacattccctagccaaggcagaagtccttaggcgggacttccttaccaccacgggtgctaaaagaagagttagtaggtcatgcttctaccagtaatctaaggactctctccttctcttcttcctctttctccagatttccaagccttagctaagagtaatttggcttgtttagtattgttttcttatggtccagttaattaccaaaaatatttttaaaatcatctctgttaatagaatgtctaccaacttctcactatcagaaaatactcaacctccaaacaatttgaaattatctttctgatccaggtaaagaagcaaattgaaaatcaataaagtaaaaagtgacggaga

SEQ ID NO: 18 - DNA, 2035 bp, Homo sapiens
  source 1..2035: mol_type = genomic DNA
tctccgtcactttttactttattgattttcaatttgcttctttacctggatcagaaagataatttcaaattgtttggaggttgagtattttctgatagtgagaagttggtagacattctattaacagagatgattttaaaaatatttttggtaattaactggaccataagaaaacaatactaaacaagccaaattactcttagctaaggcttggaaatctggagaaagaggaagaagagaaggagagagtccttagattactggtagaagcatgacctactaactcttcttttagcacccgtggtggtaaggaagtcccgcctaaggacttctgccttggctagggaatgttccagtgttgggttatgagcctccatggcagagccacagcactgactctctgaccagctggaatttgctgcagaatgggtagggctgaaaggagaccactgtgaattagagttagaacatcaagactgatctttatttcacccagaggcagagtgataaaatggcattcttctctatttaaattctatcccatctttcttcttgtccttcctctcaaggttgctggcagaggtggttggggctatgtgcctggagtgaagattctgcccattggtcaagagacctccctctcagatgctggctctgcccctgcctttgggggtcgacccttgtactcgcaggaccttaggtgactagttgtttcttcttttatttcccctattcgtgatgatcggaaaggtgaaaaacctggaggccttttcatcagtgagatcattcccagtggttgacagttgacagtagggtaaatttttttctcccagggtaccacataaacttcagcgttgcaatctaggctttggccaagttttttggtctcacagctttcggtcaactcttcattactttccttggaacatgtggtttccctggccacgaagtcaataaaatatttcttgccagccaccacctgtactcttgcttttttcacattgtcaatcttgaaatagaaagttgcgttattctctgcattaagctttgtgatggtgtgagtcagtgtctcctccagctctgggctgttggtgggtatatctctggggcagcccacgcaaatcttggtaggtggttgtacaaaatccttccctggataaatgtcacagttctgtgagaaggaagcaattcgtagctgaatatcgatgtatgcattatctgtacattcaccggtatcctgtctttgggcccgttttacttcattaagcatgaagagggaggaatgttgagtgttgttgttaaagtactgaatgccgtgtctcagaatgggctccaggtctgggctctgcgttgatataggatgcacacagccgaggcagtcgtactgggctgtcaccacagggccctcggctggagtaatctggcaggtctgggtagccacggagaatttcgtactgctcctcttccccacggttgccgtgcattctccagtggctgcttttgcagcatccttgtactcacagtcctgccaggttttgccactttgaacaggacaatccccctccttgatttcgtacttgaaggaataaaacgtgtcagagccaaccgtcttagtggcttcagttatgcggtacaatacaaactggttgttactttggttttgactgttatatttcttcagagcagcatccacagctttaaataaatccttgtcattgcagtcaatttcctcggactgtgattcctgggttaaacttagtagcagcctggagcagaggaaaaggatggtaattagtttcatgatctaacaatctccctctaggagctgagggatggtttcaccaagaatcaagagccaactgggatactgaatttgacaatctccagcctcttgtttcttctgtcctcctctctgcctcagaactcagggcactggttggattcctgctgccagacgctagttgccttgttcccaaaggttaaatggctctgctgggttatccaaacatatttacagctagaacattgcaacact

SEQ ID NO: 19 - DNA, 2047 bp, Macaca fascicularis
  source 1..2047: mol_type = genomic DNA
ccccagtgttgcaatgttctagccgtaaatatgtttggataacccagcagagccatttaacctttgggaacagggcaactagcgtatggcagcaggaatccaaccagtgccctgagtgctgaggcagagaggaggacagaaaacgagaggctggagattgtcaaattcagtatcccagttggctcttgattcttggtgaaaccatccctcagctcctagagggagactgttagatcatgaaactaattatcatccttttcttctgctccaggctgctactaagtttaacccaggaatcacagtccgaggaaattgactgcaatgataaggatttatttaaagctgtggatgctgctctgaagaaatataacagtcaaaaccaaagtaacaaccagttcgtactgtaccgcataactgaagccactaagatggttcgctctgacacattttattccttcaagtacgaaatcaaggagggggattgtcctgttcaaagtggcaaaacctggcaggactgtgactacaaggatgctgcagaagcggccactggagaatgcacagcaactgtggggaagagggcgagtatgaaattctctgtggctacccagacctgccagattactccagccgagggccctgtggtgacagcccagtataactgccttggctgtgtgcatcctatatcaacgcagagcccagacctggagcccattctgagacacggcgttcagtactttaacaacaatactcaacattcctccctcttcacgcttagtgaagtaaaacgggcccaaagacaggataccggtgaatgtacagataatgcatacgtcgatactcagctacaaattgcttccttctcacagaagtgtgacatttatccaggggaggattttgtacaaccaccttccaagatttgcgtgggctgccccagagatatacccaccaacagcccagagctggaggagacactgactcacaccatcacaaagcttaatgcggagaataacgcaactttctatttcaagattgacaatgtgaaaaaagcaagagtacaggtggtggctggcaagaaatattttattgactttgtggccagggaaaccacatgttccaaggaaagtaatgaagagttgaccgaaagctgtgagaccaaaaaacttggtcaaagcctagattgcaatgctgaagtttatgtggtaccctgggagaagaaaatttaccctactgtcaactgtcaaccactgggaatgatctcattgatgaaaaggcctccaggtttttcacctttccgatcaacacaagtaggggaaataaaagaagaaacaactagtcacctaaggtcctgcgagtacaagggtcgacccccaaaggcaggggcagagccagcatctgagagggaggtctcttgaccaatgggcagaatcttcactccaggcacatagccccagccacctctgccagcaaccttgagaggaaggacaagaagaaagatgggatagaatttaaatagagaagaatgccattttatcactctgcctctgggtgaaataaagatcagtcttgatgttcttactcctggttaattcacagtggtctcctttcggccatacccatcctgcagcaaattccagctggtcagagagtcagtgctgtggctctgccatggaggttcataacccaacactggaacattctctaaccaaggcagaagtgctttggcgggacttccttttagcaccatgggtgctaaaagaagagttagcaggtcatgctactaatctaaggactctctctaccttctcttcttcctctttatccagatttccaagccttagctaagagtaatttggcttgtttagtattgttttcttatagtccagttgattaccaaaaataatttttaaaatcatctctgttaatatgatgtctaccaacttctcattatcagaaaatacctaacctccaaagaaatttgaaattatctttctgatccaggtaaagaagcaaatagaaaatcaataaaataaaaagtgacagacatttt

SEQ ID NO: 20 - DNA, 2047 bp, Macaca fascicularis
  source 1..2047: mol_type = genomic DNA
aaaatgtctgtcactttttattttattgattttctatttgcttctttacctggatcagaaagataatttcaaatttctttggaggttaggtattttctgataatgagaagttggtagacatcatattaacagagatgattttaaaaattatttttggtaatcaactggactataagaaaacaatactaaacaagccaaattactcttagctaaggcttggaaatctggataaagaggaagaagagaaggtagagagagtccttagattagtagcatgacctgctaactcttcttttagcacccatggtgctaaaaggaagtcccgccaaagcacttctgccttggttagagaatgttccagtgttgggttatgaacctccatggcagagccacagcactgactctctgaccagctggaatttgctgcaggatgggtatggccgaaaggagaccactgtgaattaaccaggagtaagaacatcaagactgatctttatttcacccagaggcagagtgataaaatggcattcttctctatttaaattctatcccatctttcttcttgtccttcctctcaaggttgctggcagaggtggctggggctatgtgcctggagtgaagattctgcccattggtcaagagacctccctctcagatgctggctctgcccctgcctttgggggtcgacccttgtactcgcaggaccttaggtgactagttgtttcttcttttatttcccctacttgtgttgatcggaaaggtgaaaaacctggaggccttttcatcaatgagatcattcccagtggttgacagttgacagtagggtaaattttcttctcccagggtaccacataaacttcagcattgcaatctaggctttgaccaagttttttggtctcacagctttcggtcaactcttcattactttccttggaacatgtggtttccctggccacaaagtcaataaaatatttcttgccagccaccacctgtactcttgcttttttcacattgtcaatcttgaaatagaaagttgcgttattctccgcattaagctttgtgatggtgtgagtcagtgtctcctccagctctgggctgttggtgggtatatctctggggcagcccacgcaaatcttggaaggtggttgtacaaaatcctcccctggataaatgtcacacttctgtgagaaggaagcaatttgtagctgagtatcgacgtatgcattatctgtacattcaccggtatcctgtctttgggcccgttttacttcactaagcgtgaagagggaggaatgttgagtattgttgttaaagtactgaacgccgtgtctcagaatgggctccaggtctgggctctgcgttgatataggatgcacacagccaaggcagttatactgggctgtcaccacagggccctcggctggagtaatctggcaggtctgggtagccacagagaatttcatactcgccctcttccccacagttgctgtgcattctccagtggccgcttctgcagcatccttgtagtcacagtcctgccaggttttgccactttgaacaggacaatccccctccttgatttcgtacttgaaggaataaaatgtgtcagagcgaaccatcttagtggcttcagttatgcggtacagtacgaactggttgttactttggttttgactgttatatttcttcagagcagcatccacagctttaaataaatccttatcattgcagtcaatttcctcggactgtgattcctgggttaaacttagtagcagcctggagcagaagaaaaggatgataattagtttcatgatctaacagtctccctctaggagctgagggatggtttcaccaagaatcaagagccaactgggatactgaatttgacaatctccagcctctcgttttctgtcctcctctctgcctcagcactcagggcactggttggattcctgctgccatacgctagttgccctgttcccaaaggttaaatggctctgctgggttatccaaacatatttacggctagaacattgcaacactgggg

SEQ ID NO: 21 - DNA, 1612 bp, Mus musculus
  source 1..1612: mol_type = genomic DNA
agagtcctgtttgttctctgggaagagggcacacaagaggtgacttcaagaatctaaataggggcctaagtggtgaggcagagagagctgaggcaggagagatcagagcccggaggctgccaaaatcagcttctgagttggtttcccattcttggcaaaacagtccctcagttctagagggacccttaaatcatgaagctcattactacactgctcctctgctccggactcctgctgactttaacacagggagaagaagcgcaggaaattgactgcaatgatgaggctgtatttcaggctgtggatgcctctctgaagaagcttaatgctaggttacaaagcggcaaccagtttgtgttgtaccgagtgaccaagcgcgctaaaatggatggctctgcaaccttttattccttcaattatcaaatcaaggagggcaactgctctgctcagagaggcctggcgtggcaggactgtgacttcaaggactctgaggaagccgccactggagaatgcacagcaactatggggaagaaagaaaataagtttttcatagtcacccagacctgcaagattactccaggtaagggccccatagtgacagaggagtaccactgtgcgagttgtgtgcatcccatatcggcagataatccagacctggagcctgttttgaaacacgccatcgaatatttcaacaacaacacaggtcacagccacctctttgctctcagagaagtaaaaagtgcccaaggacaggtggtgggtggcctgaattttgacattatctacacaattgtgcaaacaaattgttcaaaggagcgttttccttccctccgtggagactgtgtggcacttcccaatggtgatggtggtgagtgtagaggtaatgctttcctggatactgataacaaaattgaggacttcacgcagagctgtgaccttcatccaggagatgatttggtagaagcgcttcccaagccttgccctggctgccccagggacatacctgtagacagcccagagctgaaggaggtgcttggtcattccattgcacagctaaatacagagaatgaccatcctttctatttcaagattgacaccgtgaaaaaagcaacatcacaggtggtagcaggaactaattatgttattgagttcatagccagagaaaccaaatgttccaaggaaagtaacacagagctgacagaagattgtgagatcaagcaccttggacaaagtctcgactgcaatgctaacgtgtacatgagaccttgggagaacaaagtcatcccgactgtgaaatgccaagcattagataagactattcctatccgaaggaggcctccaggcttttctcctttccggtcagccaaagtacaagaaacaaaagcaggaacaactaggctcctacgcgcgtgcgagtacaagggcagactctcaaaggcaggggcagagccagcgcctgagcgtcaggcagaatcttcacaagtgaagcagtagtcccagcaatgacccagagggaaggagcagaagaatcctgagatgtgtggagcgcgggaccatcgtcttcatcaccctgatcctagtggaaataaaattcagagttgatgattttaca

SEQ ID NO: 22 - DNA, 1612 bp, Mus musculus
  source 1..1612: mol_type = genomic DNA
tgtaaaatcatcaactctgaattttatttccactaggatcagggtgatgaagacgatggtcccgcgctccacacatctcaggattcttctgctccttccctctgggtcattgctgggactactgcttcacttgtgaagattctgcctgacgctcaggcgctggctctgcccctgcctttgagagtctgcccttgtactcgcacgcgcgtaggagcctagttgttcctgcttttgtttcttgtactttggctgaccggaaaggagaaaagcctggaggcctccttcggataggaatagtcttatctaatgcttggcatttcacagtcgggatgactttgttctcccaaggtctcatgtacacgttagcattgcagtcgagactttgtccaaggtgcttgatctcacaatcttctgtcagctctgtgttactttccttggaacatttggtttctctggctatgaactcaataacataattagttcctgctaccacctgtgatgttgcttttttcacggtgtcaatcttgaaatagaaaggatggtcattctctgtatttagctgtgcaatggaatgaccaagcacctccttcagctctgggctgtctacaggtatgtccctggggcagccagggcaaggcttgggaagcgcttctaccaaatcatctcctggatgaaggtcacagctctgcgtgaagtcctcaattttgttatcagtatccaggaaagcattacctctacactcaccaccatcaccattgggaagtgccacacagtctccacggagggaaggaaaacgctcctttgaacaatttgtttgcacaattgtgtagataatgtcaaaattcaggccacccaccacctgtccttgggcactttttacttctctgagagcaaagaggtggctgtgacctgtgttgttgttgaaatattcgatggcgtgtttcaaaacaggctccaggtctggattatctgccgatatgggatgcacacaactcgcacagtggtactcctctgtcactatggggcccttacctggagtaatcttgcaggtctgggtgactatgaaaaacttattttctttcttccccatagttgctgtgcattctccagtggcggcttcctcagagtccttgaagtcacagtcctgccacgccaggcctctctgagcagagcagttgccctccttgatttgataattgaaggaataaaaggttgcagagccatccattttagcgcgcttggtcactcggtacaacacaaactggttgccgctttgtaacctagcattaagcttcttcagagaggcatccacagcctgaaatacagcctcatcattgcagtcaatttcctgcgcttcttctccctgtgttaaagtcagcaggagtccggagcagaggagcagtgtagtaatgagcttcatgatttaagggtccctctagaactgagggactgttttgccaagaatgggaaaccaactcagaagctgattttggcagcctccgggctctgatctctcctgcctcagctctctctgcctcaccacttaggcccctatttagattcttgaagtcacctcttgtgtgccctcttcccagagaacaaacaggactct

SEQ ID NO: 23 - DNA, 1674 bp, Rattus norvegicus
  source 1..1674: mol_type = genomic DNA
aggtcaacaaccccttgttgcaatgccccagctgggtacctgcttggacgtggagcagagtcctgtttgttctctgagaagagggcaaacaaggggtgactgcaggaatctaaaagggaccagagtggcgagacagagagagcataggcaggagaagtcagagactggaggctgctaaaagcagcttctgagttggtttcctggtcttggcaaaacaattcctcaattccagagggaacctttaatcatgaagctaattactatcctgctcctctgctccaggctcctgccaagtttagcgcaggaagaaggcgcccaggaattgaactgcaatgatgagactgtatttcaggctgtggatactgctctgaagaaatataacgctgagttagaaagcggcaaccagtttgtgttgtaccgagtgactaagggcactaagaaggatggcgctgaaacattgtattccttcaagtatcaaatcaaggagggcaactgctctgttcagagtggcctcacctggcaggactgtgacttcaaggacgctgaggaagccgctactggcgaatgcacaacaactttggggaagaaagaaaataaattctccgtagccacccagatctgcaatattactccaggtaagggtcctaagaagacagaggaggacctctgtgtcgggtgtttccaacccataccgatggatagctcagacctgaagcctgttctgaaacacgctgtggagcatttcaacaacaacacgaagcacacccacctctttgctctcagagaagtaaagagtgcccactcacaggtggtggctggcatgaattataaaattatctactccattgtgcaaacaaattgttcaaaggaggattttccttccctccgtgaagactgtgtaccccttccctatggcgatcatggtgagtgtacgggtcatacccacgtggatattcataacacaattgccggcttctcacagagctgtgacctttatccaggagatgatttgtttgaactacttcccaagaattgccgtggctgccccagggagatacctgtagacagcccggagctgaaggaggcacttggtcattccattgcacagcttaatgcacagcataaccatattttctatttcaagattgacaccgtgaaaaaggcaacatcacaggtggttgctggagtaatatatgtgattgagttcatagccagagaaactaactgttccaagcaaagtaaaacagaactgacagcggattgtgagaccaaacacctcggtcaaagcctcaactgcaatgctaacgtgtacatgagaccttgggagaacaaagtcgtcccgactgtcagatgccaagcactagatatgatgatttctaggcctccaggattttcacctttccggctggtgcgagtacaagaaactaaagaaggaacaactaggctcctaaactcatgtgagtacaagggcagactctcaaaggcaagggcaggcccagcacctgaccatcaggcagaagcttcaaccgtgacatcatagcctggcaaagacccggagtggaaggaccagaagactcctgggatgtgtgcagtatggaagcatgtttcttcatcacctgatcctgggtgaaataaagttcagactcgaaaaaaaaaaaaaaaaaaaaaaaaaaa

SEQ ID NO: 24 - DNA, 1674 bp, Rattus norvegicus
  source 1..1674: mol_type = genomic DNA
tttttttttttttttttttttttttttcgagtctgaactttatttcacccaggatcaggtgatgaagaaacatgcttccatactgcacacatcccaggagtcttctggtccttccactccgggtctttgccaggctatgatgtcacggttgaagcttctgcctgatggtcaggtgctgggcctgcccttgcctttgagagtctgcccttgtactcacatgagtttaggagcctagttgttccttctttagtttcttgtactcgcaccagccggaaaggtgaaaatcctggaggcctagaaatcatcatatctagtgcttggcatctgacagtcgggacgactttgttctcccaaggtctcatgtacacgttagcattgcagttgaggctttgaccgaggtgtttggtctcacaatccgctgtcagttctgttttactttgcttggaacagttagtttctctggctatgaactcaatcacatatattactccagcaaccacctgtgatgttgcctttttcacggtgtcaatcttgaaatagaaaatatggttatgctgtgcattaagctgtgcaatggaatgaccaagtgcctccttcagctccgggctgtctacaggtatctccctggggcagccacggcaattcttgggaagtagttcaaacaaatcatctcctggataaaggtcacagctctgtgagaagccggcaattgtgttatgaatatccacgtgggtatgacccgtacactcaccatgatcgccatagggaaggggtacacagtcttcacggagggaaggaaaatcctcctttgaacaatttgtttgcacaatggagtagataattttataattcatgccagccaccacctgtgagtgggcactctttacttctctgagagcaaagaggtgggtgtgcttcgtgttgttgttgaaatgctccacagcgtgtttcagaacaggcttcaggtctgagctatccatcggtatgggttggaaacacccgacacagaggtcctcctctgtcttcttaggacccttacctggagtaatattgcagatctgggtggctacggagaatttattttctttcttccccaaagttgttgtgcattcgccagtagcggcttcctcagcgtccttgaagtcacagtcctgccaggtgaggccactctgaacagagcagttgccctccttgatttgatacttgaaggaatacaatgtttcagcgccatccttcttagtgcccttagtcactcggtacaacacaaactggttgccgctttctaactcagcgttatatttcttcagagcagtatccacagcctgaaatacagtctcatcattgcagttcaattcctgggcgccttcttcctgcgctaaacttggcaggagcctggagcagaggagcaggatagtaattagcttcatgattaaaggttccctctggaattgaggaattgttttgccaagaccaggaaaccaactcagaagctgcttttagcagcctccagtctctgacttctcctgcctatgctctctctgtctcgccactctggtcccttttagattcctgcagtcaccccttgtttgccctcttctcagagaacaaacaggactctgctccacgtccaagcaggtacccagctggggcattgcaacaaggggttgttgacct

SEQ ID NO: 25 - skipped

SEQ ID NO: 26 - protein, 16 aa, unidentified
  REGION 1..16: note = source = /note="Description of Unknown: RFGF sequence"
AAVALLPAVLLALLAP

SEQ ID NO: 27 - protein, 11 aa, unidentified
  REGION 1..11: note = source = /note="Description of Unknown: RFGF analogue sequence"
AALLPVLLAAP

SEQ ID NO: 28 - protein, 13 aa, Human immunodeficiency virus
GRKKRRQRRRPPQ

SEQ ID NO: 29 - protein, 16 aa, Drosophila sp.
RQIKIWFQNRRMKWKK

SEQ ID NO: 30-377 - skipped (348 entries)

SEQ ID NO: 378 - RNA, 21 nt, synthetic construct
  source 1..21: mol_type = other RNA
ggtgagcttggagtcaacact

SEQ ID NO: 379 - RNA, 21 nt, synthetic construct
  source 1..21: mol_type = other RNA
gagcttggagtcaacacttta

SEQ ID NO: 380 - RNA, 21 nt, synthetic construct
  source 1..21: mol_type = other RNA
cttggagtcaacactttcgat

SEQ ID NO: 381 - RNA, 21 nt, synthetic construct
  source 1..21: mol_type = other RNA
ttggagtcaacactttcgatt

SEQ ID NO: 382 - RNA, 21 nt, synthetic construct
  source 1..21: mol_type = other RNA
aacactttcgattccacctta

SEQ ID NO: 383 - RNA, 21 nt, synthetic construct
  source 1..21: mol_type = other RNA
aggagcataagtacaaagcta

SEQ ID NO: 384 - RNA, 21 nt, synthetic construct
  source 1..21: mol_type = other RNA
gagcataagtacaaagctgaa

SEQ ID NO: 385 - RNA, 21 nt, synthetic construct
  source 1..21: mol_type = other RNA
taagtacaaagctgaagagca

SEQ ID NO: 386 - RNA, 21 nt, synthetic construct
  source 1..21: mol_type = other RNA
aagtacaaagctgaagagcaa

SEQ ID NO: 387 - RNA, 21 nt, synthetic construct
  source 1..21: mol_type = other RNA
taccacaaatgtacccacaaa

SEQ ID NO: 388 - RNA, 21 nt, synthetic construct
  source 1..21: mol_type = other RNA
ccacaaatgtacccacaagga

SEQ ID NO: 389 - RNA, 21 nt, synthetic construct
  source 1..21: mol_type = other RNA
tactgtttggagcccaagaaa

SEQ ID NO: 390 - RNA, 21 nt, synthetic construct
  source 1..21: mol_type = other RNA
actgtttggagcccaagaaaa

SEQ ID NO: 391 - RNA, 21 nt, synthetic construct
  source 1..21: mol_type = other RNA
ctgtttggagcccaagaaagt

SEQ ID NO: 392 - RNA, 21 nt, synthetic construct
  source 1..21: mol_type = other RNA
ggagcccaagaaagtgaaaga

SEQ ID NO: 393 - RNA, 21 nt, synthetic construct
  source 1..21: mol_type = other RNA
gagcccaagaaagtgaaagaa

SEQ ID NO: 394 - RNA, 21 nt, synthetic construct
  source 1..21: mol_type = other RNA
agcccaagaaagtgaaagaca

SEQ ID NO: 395 - RNA, 21 nt, synthetic construct
  source 1..21: mol_type = other RNA
gcccaagaaagtgaaagacca

SEQ ID NO: 396 - RNA, 21 nt, synthetic construct
  source 1..21: mol_type = other RNA
cccaagaaagtgaaagaccaa

SEQ ID NO: 397 - RNA, 21 nt, synthetic construct
  source 1..21: mol_type = other RNA
caagaaagtgaaagaccatta

SEQ ID NO: 398 - RNA, 21 nt, synthetic construct
  source 1..21: mol_type = other RNA
gaaagtgaaagaccactgcaa

SEQ ID NO: 399 - RNA, 21 nt, synthetic construct
  source 1..21: mol_type = other RNA
aaagtgaaagaccactgcaga

SEQ ID NO: 400 - RNA, 21 nt, synthetic construct
  source 1..21: mol_type = other RNA
tcactggaaaccactgccaga

SEQ ID NO: 401 - RNA, 21 nt, synthetic construct
  source 1..21: mol_type = other RNA
actgccagaaagagaagtgct

SEQ ID NO: 402 - RNA, 21 nt, synthetic construct
  source 1..21: mol_type = other RNA
ctgccagaaagagaagtgctt

SEQ ID NO: 403 - RNA, 21 nt, synthetic construct
  source 1..21: mol_type = other RNA
cagaaagagaagtgctttgaa

SEQ ID NO: 404 - RNA, 21 nt, synthetic construct
  source 1..21: mol_type = other RNA
agaaagagaagtgctttgaga

SEQ ID NO: 405 - RNA, 21 nt, synthetic construct
  source 1..21: mol_type = other RNA
agtgctttgagcctcagctta

SEQ ID NO: 406 - RNA, 21 nt, synthetic construct
  source 1..21: mol_type = other RNA
ttccacaagaatgagatatga

SEQ ID NO: 407 - RNA, 21 nt, synthetic construct
  source 1..21: mol_type = other RNA
tccacaagaatgagatatggt

SEQ ID NO: 408 - RNA, 21 nt, synthetic construct
  source 1..21: mol_type = other RNA
ccacaagaatgagatatggta

SEQ ID NO: 409 - RNA, 21 nt, synthetic construct
  source 1..21: mol_type = other RNA
aagaatgagatatggtataga

SEQ ID NO: 410 - RNA, 21 nt, synthetic construct
  source 1..21: mol_type = other RNA
tggtatagaactgagcaagca

SEQ ID NO: 411 - RNA, 21 nt, synthetic construct
  source 1..21: mol_type = other RNA
gtatagaactgagcaagcaga

SEQ ID NO: 412 - RNA, 21 nt, synthetic construct
  source 1..21: mol_type = other RNA
atagaactgagcaagcagcta

SEQ ID NO: 413 - RNA, 21 nt, synthetic construct
  source 1..21: mol_type = other RNA
ccagatgccagtgcaagggta

SEQ ID NO: 414 - RNA, 21 nt, synthetic construct
  source 1..21: mol_type = other RNA
gccagtgcaagggtcctgata

SEQ ID NO: 415 - RNA, 21 nt, synthetic construct
  source 1..21: mol_type = other RNA
cagtgcaagggtcctgatgca

SEQ ID NO: 416 - RNA, 21 nt, synthetic construct
  source 1..21: mol_type = other RNA
accaaggcaagctgctatgat

SEQ ID NO: 417 - RNA, 21 nt, synthetic construct
  source 1..21: mol_type = other RNA
ccaaggcaagctgctatgata

SEQ ID NO: 418 - RNA, 21 nt, synthetic construct
  source 1..21: mol_type = other RNA
aggcttcatgtcccactcata

SEQ ID NO: 419 - RNA, 21 nt, synthetic construct
  source 1..21: mol_type = other RNA
ggctccgcaagagtctgtctt

SEQ ID NO: 420 - RNA, 21 nt, synthetic construct
  source 1..21: mol_type = other RNA
gctccgcaagagtctgtctta

SEQ ID NO: 421 - RNA, 21 nt, synthetic construct
  source 1..21: mol_type = other RNA
ccgcaagagtctgtcttcgat

SEQ ID NO: 422 - RNA, 21 nt, synthetic construct
  source 1..21: mol_type = other RNA
gttcgagggggctgaagaata

SEQ ID NO: 423 - RNA, 21 nt, synthetic construct
  source 1..21: mol_type = other RNA
ggaaggcaagattgtgtccca

SEQ ID NO: 424 - RNA, 21 nt, synthetic construct
  source 1..21: mol_type = other RNA
aggcaagattgtgtcccatta

SEQ ID NO: 425 - RNA, 21 nt, synthetic construct
  source 1..21: mol_type = other RNA
aactcaataaagtgctttgaa

SEQ ID NO: 426 - RNA, 21 nt, synthetic construct
  source 1..21: mol_type = other RNA
aataaagtgctttgaaaacgt

SEQ ID NO: 427 - RNA, 21 nt, synthetic construct
  source 1..21: mol_type = other RNA
agtgctttgaaaatgctgaga

SEQ ID NO: 428 - RNA, 23 nt, synthetic construct
  source 1..23: mol_type = other RNA
agtgttgactccaagctcaccag

SEQ ID NO: 429 - RNA, 23 nt, synthetic construct
  source 1..23: mol_type = other RNA
taaagtgttgactccaagctcac

SEQ ID NO: 430 - RNA, 23 nt, synthetic construct
  source 1..23: mol_type = other RNA
atcgaaagtgttgactccaagct

SEQ ID NO: 431 - RNA, 23 nt, synthetic construct
  source 1..23: mol_type = other RNA
aatcgaaagtgttgactccaagc

SEQ ID NO: 432 - RNA, 23 nt, synthetic construct
  source 1..23: mol_type = other RNA
taaggtggaatcgaaagtgttga

SEQ ID NO: 433 - RNA, 23 nt, synthetic construct
  source 1..23: mol_type = other RNA
tagctttgtacttatgctccttg

SEQ ID NO: 434 - RNA, 23 nt, synthetic construct
  source 1..23: mol_type = other RNA
ttcagctttgtacttatgctcct

SEQ ID NO: 435 - RNA, 23 nt, synthetic construct
  source 1..23: mol_type = other RNA
tgctcttcagctttgtacttatg

SEQ ID NO: 436 - RNA, 23 nt, synthetic construct
  source 1..23: mol_type = other RNA
ttgctcttcagctttgtacttat

SEQ ID NO: 437 - RNA, 23 nt, synthetic construct
  source 1..23: mol_type = other RNA
tttgtgggtacatttgtggtaca

SEQ ID NO: 438 - RNA, 23 nt, synthetic construct
  source 1..23: mol_type = other RNA
tccttgtgggtacatttgtggta

SEQ ID NO: 439 - RNA, 23 nt, synthetic construct
  source 1..23: mol_type = other RNA
tttcttgggctccaaacagtatc

SEQ ID NO: 440 - RNA, 23 nt, synthetic construct
  source 1..23: mol_type = other RNA
ttttcttgggctccaaacagtat

SEQ ID NO: 441 - RNA, 23 nt, synthetic construct
  source 1..23: mol_type = other RNA
actttcttgggctccaaacagta

SEQ ID NO: 442 - RNA, 23 nt, synthetic construct
  source 1..23: mol_type = other RNA
tctttcactttcttgggctccaa

SEQ ID NO: 443 - RNA, 23 nt, synthetic construct
  source 1..23: mol_type = other RNA
ttctttcactttcttgggctcca

SEQ ID NO: 444 - RNA, 23 nt, synthetic construct
  source 1..23: mol_type = other RNA
tgtctttcactttcttgggctcc

SEQ ID NO: 445 - RNA, 23 nt, synthetic construct
  source 1..23: mol_type = other RNA
tggtctttcactttcttgggctc

SEQ ID NO: 446 - RNA, 23 nt, synthetic construct
  source 1..23: mol_type = other RNA
ttggtctttcactttcttgggct

SEQ ID NO: 447 - RNA, 23 nt, synthetic construct
  source 1..23: mol_type = other RNA
taatggtctttcactttcttggg

SEQ ID NO: 448 - RNA, 23 nt, synthetic construct
  source 1..23: mol_type = other RNA
ttgcagtggtctttcactttctt

SEQ ID NO: 449 - RNA, 23 nt, synthetic construct
  source 1..23: mol_type = other RNA
tctgcagtggtctttcactttct

SEQ ID NO: 450 - RNA, 23 nt, synthetic construct
  source 1..23: mol_type = other RNA
tctggcagtggtttccagtgagg

SEQ ID NO: 451 - RNA, 23 nt, synthetic construct
  source 1..23: mol_type = other RNA
agcacttctctttctggcagtgg

SEQ ID NO: 452 - RNA, 23 nt, synthetic construct
  source 1..23: mol_type = other RNA
aagcacttctctttctggcagtg

SEQ ID NO: 453 - RNA, 23 nt, synthetic construct
  source 1..23: mol_type = other RNA
ttcaaagcacttctctttctggc

SEQ ID NO: 454 - RNA, 23 nt, synthetic construct
  source 1..23: mol_type = other RNA
tctcaaagcacttctctttctgg

SEQ ID NO: 455 - RNA, 23 nt, synthetic construct
  source 1..23: mol_type = other RNA
taagctgaggctcaaagcacttc

SEQ ID NO: 456 - RNA, 23 nt, synthetic construct
  source 1..23: mol_type = other RNA
tcatatctcattcttgtggaaaa

SEQ ID NO: 457 - RNA, 23 nt, synthetic construct
  source 1..23: mol_type = other RNA
accatatctcattcttgtggaaa

SEQ ID NO: 458 - RNA, 23 nt, synthetic construct
  source 1..23: mol_type = other RNA
taccatatctcattcttgtggaa

SEQ ID NO: 459 - RNA, 23 nt, synthetic construct
  source 1..23: mol_type = other RNA
tctataccatatctcattcttgt

SEQ ID NO: 460 - RNA, 23 nt, synthetic construct
  source 1..23: mol_type = other RNA
tgcttgctcagttctataccata

SEQ ID NO: 461 - RNA, 23 nt, synthetic construct
  source 1..23: mol_type = other RNA
tctgcttgctcagttctatacca

SEQ ID NO: 462 - RNA, 23 nt, synthetic construct
  source 1..23: mol_type = other RNA
tagctgcttgctcagttctatac

SEQ ID NO: 463 - RNA, 23 nt, synthetic construct
  source 1..23: mol_type = other RNA
tacccttgcactggcatctggcc

SEQ ID NO: 464 - RNA, 23 nt, synthetic construct
  source 1..23: mol_type = other RNA
tatcaggacccttgcactggcat

SEQ ID NO: 465 - RNA, 23 nt, synthetic construct
  source 1..23: mol_type = other RNA
tgcatcaggacccttgcactggc

SEQ ID NO: 466 - RNA, 23 nt, synthetic construct
  source 1..23: mol_type = other RNA
atcatagcagcttgccttggtgt

SEQ ID NO: 467 - RNA, 23 nt, synthetic construct
  source 1..23: mol_type = other RNA
tatcatagcagcttgccttggtg

SEQ ID NO: 468 - RNA, 23 nt, synthetic construct
  source 1..23: mol_type = other RNA
tatgagtgggacatgaagcctag

SEQ ID NO: 469 - RNA, 23 nt, synthetic construct
  source 1..23: mol_type = other RNA
aagacagactcttgcggagccgc

SEQ ID NO: 470 - RNA, 23 nt, synthetic construct
  source 1..23: mol_type = other RNA
taagacagactcttgcggagccg

SEQ ID NO: 471 - RNA, 23 nt, synthetic construct
  source 1..23: mol_type = other RNA
atcgaagacagactcttgcggag

SEQ ID NO: 472 - RNA, 23 nt, synthetic construct
  source 1..23: mol_type = other RNA
tattcttcagccccctcgaactg

SEQ ID NO: 473 - RNA, 23 nt, synthetic construct
  source 1..23: mol_type = other RNA
tgggacacaatcttgccttccat

SEQ ID NO: 474 - RNA, 23 nt, synthetic construct
  source 1..23: mol_type = other RNA
taatgggacacaatcttgccttc

SEQ ID NO: 475 - RNA, 23 nt, synthetic construct
  source 1..23: mol_type = other RNA
ttcaaagcactttattgagtttc

SEQ ID NO: 476 - RNA, 23 nt, synthetic construct
  source 1..23: mol_type = other RNA
acgttttcaaagcactttattga

SEQ ID NO: 477 - RNA, 23 nt, synthetic construct
  source 1..23: mol_type = other RNA
tctcagcattttcaaagcacttt

SEQ ID NO: 478 - RNA, 21 nt, synthetic construct
  source 1..21: mol_type = other RNA
  modified_base 1: mod_base = OTHER; note = 2'-deoxy-2'-fluoroguanosine-3'-phosphorothioate
  modified_base 2: mod_base = OTHER; note = 2'-O-methylguanosine-3'-phosphorothioate
  modified_base 3: mod_base = OTHER; note = 2'-deoxy-2'-fluorouridine-3'-phosphate
  modified_base 4: mod_base = OTHER; note = 2'-O-methylguanosine-3'-phosphate
  modified_base 5: mod_base = OTHER; note = 2'-deoxy-2'-fluoroadenosine-3'-phosphate
  modified_base 6: mod_base = OTHER; note = 2'-O-methylguanosine-3'-phosphate
  modified_base 7: mod_base = OTHER; note = 2'-deoxy-2'-fluorocytidine-3'-phosphate
  modified_base 8: mod_base = OTHER; note = 2'-O-methyluridine-3'-phosphate
  modified_base 9: mod_base = OTHER; note = 2'-deoxy-2'-fluorouridine-3'-phosphate
  modified_base 10: mod_base = OTHER; note = 2'-deoxy-2'-fluoroguanosine-3'-phosphate
  modified_base 11: mod_base = OTHER; note = 2'-deoxy-2'-fluoroguanosine-3'-phosphate
  modified_base 12: mod_base = OTHER; note = 2'-O-methyladenosine-3'-phosphate
  modified_base 13: mod_base = OTHER; note = 2'-deoxy-2'-fluoroguanosine-3'-phosphate
  modified_base 14: mod_base = OTHER; note = 2'-O-methyluridine-3'-phosphate
  modified_base 15: mod_base = OTHER; note = 2'-deoxy-2'-fluorocytidine-3'-phosphate
  modified_base 16: mod_base = OTHER; note = 2'-O-methyladenosine-3'-phosphate
  modified_base 17: mod_base = OTHER; note = 2'-deoxy-2'-fluoroadenosine-3'-phosphate
  modified_base 18: mod_base = OTHER; note = 2'-O-methylcytidine-3'-phosphate
  modified_base 19: mod_base = OTHER; note = 2'-deoxy-2'-fluoroadenosine-3'-phosphate
  modified_base 20: mod_base = OTHER; note = 2'-O-methylcytidine-3'-phosphate
  modified_base 21: mod_base = OTHER; note = 2'-deoxy-2'-fluorouridine-3'-phosphate ((2S,4R)-1-[29-[[2-(acetylamino)-2-deoxy-beta-D-galactopyra nosyl]oxy]-14,14-bis[[3-[[3-[[5-[[2-(acetylamino)-2-deoxy-b eta-D-galactopyranosyl]oxy]-1-oxopentyl]amino]propyl]amino] -3-oxopropoxy]methyl]-1,12,19,25-tetraoxo-16-oxa-13,20,24-t riazanonacos-1-yl]-4-hydroxy-2-pyrrolidinyl)methyl ester
ggtgagcttggagtcaacact

SEQ ID NO: 479 - RNA, 21 nt, synthetic construct
  source 1..21: mol_type = other RNA
  modified_base 1: mod_base = OTHER; note = 2'-deoxy-2'-fluoroguanosine-3'-phosphorothioate
  modified_base 2: mod_base = OTHER; note = 2'-O-methyladenosine-3'-phosphorothioate
  modified_base 3: mod_base = OTHER; note = 2'-deoxy-2'-fluoroguanosine-3'-phosphate
  modified_base 4: mod_base = OTHER; note = 2'-O-methylcytidine-3'-phosphate
  modified_base 5: mod_base = OTHER; note = 2'-deoxy-2'-fluorouridine-3'-phosphate
  modified_base 6: mod_base = OTHER; note = 2'-O-methyluridine-3'-phosphate
  modified_base 7: mod_base = OTHER; note = 2'-deoxy-2'-fluoroguanosine-3'-phosphate
  modified_base 8: mod_base = OTHER; note = 2'-O-methylguanosine-3'-phosphate
  modified_base 9: mod_base = OTHER; note = 2'-deoxy-2'-fluoroadenosine-3'-phosphate
  modified_base 10: mod_base = OTHER; note = 2'-deoxy-2'-fluoroguanosine-3'-phosphate
  modified_base 11: mod_base = OTHER; note = 2'-deoxy-2'-fluorouridine-3'-phosphate
  modified_base 12: mod_base = OTHER; note = 2'-O-methylcytidine-3'-phosphate
  modified_base 13: mod_base = OTHER; note = 2'-deoxy-2'-fluoroadenosine-3'-phosphate
  modified_base 14: mod_base = OTHER; note = 2'-O-methyladenosine-3'-phosphate
  modified_base 15: mod_base = OTHER; note = 2'-deoxy-2'-fluorocytidine-3'-phosphate
  modified_base 16: mod_base = OTHER; note = 2'-O-methyladenosine-3'-phosphate
  modified_base 17: mod_base = OTHER; note = 2'-deoxy-2'-fluorocytidine-3'-phosphate
  modified_base 18: mod_base = OTHER; note = 2'-O-methyluridine-3'-phosphate
  modified_base 19: mod_base = OTHER; note = 2'-deoxy-2'-fluorouridine-3'-phosphate
  modified_base 20: mod_base = OTHER; note = 2'-O-methyluridine-3'-phosphate
  modified_base 21: mod_base = OTHER; note = 2'-deoxy-2'-fluoroadenosine-3'-phosphate ((2S,4R)-1-[29-[[2-(acetylamino)-2-deoxy-beta-D-galactopyra nosyl]oxy]-14,14-bis[[3-[[3-[[5-[[2-(acetylamino)-2-deoxy-b eta-D-galactopyranosyl]oxy]-1-oxopentyl]amino]propyl]amino] -3-oxopropoxy]methyl]-1,12,19,25-tetraoxo-16-oxa-13,20,24-t riazanonacos-1-yl]-4-hydroxy-2-pyrrolidinyl)methyl ester
gagcttggagtcaacacttta

SEQ ID NO: 480 - RNA, 21 nt, synthetic construct
  source 1..21: mol_type = other RNA
  modified_base 1: mod_base = OTHER; note = 2'-deoxy-2'-fluorocytidine-3'-phosphorothioate
  modified_base 2: mod_base = OTHER; note = 2'-O-methyluridine-3'-phosphorothioate
  modified_base 3: mod_base = OTHER; note = 2'-deoxy-2'-fluorouridine-3'-phosphate
  modified_base 4: mod_base = OTHER; note = 2'-O-methylguanosine-3'-phosphate
  modified_base 5: mod_base = OTHER; note = 2'-deoxy-2'-fluoroguanosine-3'-phosphate
  modified_base 6: mod_base = OTHER; note = 2'-O-methyladenosine-3'-phosphate
  modified_base 7: mod_base = OTHER; note = 2'-deoxy-2'-fluoroguanosine-3'-phosphate
  modified_base 8: mod_base = OTHER; note = 2'-O-methyluridine-3'-phosphate
  modified_base 9: mod_base = OTHER; note = 2'-deoxy-2'-fluorocytidine-3'-phosphate
  modified_base 10: mod_base = OTHER; note = 2'-deoxy-2'-fluoroadenosine-3'-phosphate
  modified_base 11: mod_base = OTHER; note = 2'-deoxy-2'-fluoroadenosine-3'-phosphate
  modified_base 12: mod_base = OTHER; note = 2'-O-methylcytidine-3'-phosphate
  modified_base 13: mod_base = OTHER; note = 2'-deoxy-2'-fluoroadenosine-3'-phosphate
  modified_base 14: mod_base = OTHER; note = 2'-O-methylcytidine-3'-phosphate
  modified_base 15: mod_base = OTHER; note = 2'-deoxy-2'-fluorouridine-3'-phosphate
  modified_base 16: mod_base = OTHER; note = 2'-O-methyluridine-3'-phosphate
  modified_base 17: mod_base = OTHER; note = 2'-deoxy-2'-fluorouridine-3'-phosphate
  modified_base 18: mod_base = OTHER; note = 2'-O-methylcytidine-3'-phosphate
  modified_base 19: mod_base = OTHER; note = 2'-deoxy-2'-fluoroguanosine-3'-phosphate
  modified_base 20: mod_base = OTHER; note = 2'-O-methyladenosine-3'-phosphate
  modified_base 21: mod_base = OTHER; note = 2'-deoxy-2'-fluorouridine-3'-phosphate ((2S,4R)-1-[29-[[2-(acetylamino)-2-deoxy-beta-D-galactopyra nosyl]oxy]-14,14-bis[[3-[[3-[[5-[[2-(acetylamino)-2-deoxy-b eta-D-galactopyranosyl]oxy]-1-oxopentyl]amino]propyl]amino] -3-oxopropoxy]methyl]-1,12,19,25-tetraoxo-16-oxa-13,20,24-t riazanonacos-1-yl]-4-hydroxy-2-pyrrolidinyl)methyl ester
cttggagtcaacactttcgat

SEQ ID NO: 481 - RNA, 21 nt, synthetic construct
  source 1..21: mol_type = other RNA
  modified_base 1: mod_base = OTHER; note = 2'-deoxy-2'-fluorouridine-3'-phosphorothioate
  modified_base 2: mod_base = OTHER; note = 2'-O-methyluridine-3'-phosphorothioate
  modified_base 3: mod_base = OTHER; note = 2'-deoxy-2'-fluoroguanosine-3'-phosphate
  modified_base 4: mod_base = OTHER; note = 2'-O-methylguanosine-3'-phosphate
  modified_base 5: mod_base = OTHER; note = 2'-deoxy-2'-fluoroadenosine-3'-phosphate
  modified_base 6: mod_base = OTHER; note = 2'-O-methylguanosine-3'-phosphate
  modified_base 7: mod_base = OTHER; note = 2'-deoxy-2'-fluorouridine-3'-phosphate
  modified_base 8: mod_base = OTHER; note = 2'-O-methylcytidine-3'-phosphate
  modified_base 9: mod_base = OTHER; note = 2'-deoxy-2'-fluoroadenosine-3'-phosphate
  modified_base 10: mod_base = OTHER; note = 2'-deoxy-2'-fluoroadenosine-3'-phosphate
  modified_base 11: mod_base = OTHER; note = 2'-deoxy-2'-fluorocytidine-3'-phosphate
  modified_base 12: mod_base = OTHER; note = 2'-O-methyladenosine-3'-phosphate
  modified_base 13: mod_base = OTHER; note = 2'-deoxy-2'-fluorocytidine-3'-phosphate
  modified_base 14: mod_base = OTHER; note = 2'-O-methyluridine-3'-phosphate
  modified_base 15: mod_base = OTHER; note = 2'-deoxy-2'-fluorouridine-3'-phosphate
  modified_base 16: mod_base = OTHER; note = 2'-O-methyluridine-3'-phosphate
  modified_base 17: mod_base = OTHER; note = 2'-deoxy-2'-fluorocytidine-3'-phosphate
  modified_base 18: mod_base = OTHER; note = 2'-O-methylguanosine-3'-phosphate
  modified_base 19: mod_base = OTHER; note = 2'-deoxy-2'-fluoroadenosine-3'-phosphate
  modified_base 20: mod_base = OTHER; note = 2'-O-methyluridine-3'-phosphate
  modified_base 21: mod_base = OTHER; note = 2'-deoxy-2'-fluorouridine-3'-phosphate ((2S,4R)-1-[29-[[2-(acetylamino)-2-deoxy-beta-D-galactopyra nosyl]oxy]-14,14-bis[[3-[[3-[[5-[[2-(acetylamino)-2-deoxy-b eta-D-galactopyranosyl]oxy]-1-oxopentyl]amino]propyl]amino] -3-oxopropoxy]methyl]-1,12,19,25-tetraoxo-16-oxa-13,20,24-t riazanonacos-1-yl]-4-hydroxy-2-pyrrolidinyl)methyl ester
ttggagtcaacactttcgatt

SEQ ID NO: 482 - RNA, 21 nt, synthetic construct
  source 1..21: mol_type = other RNA
  modified_base 1: mod_base = OTHER; note = 2'-deoxy-2'-fluoroadenosine-3'-phosphorothioate
  modified_base 2: mod_base = OTHER; note = 2'-O-methyladenosine-3'-phosphorothioate
  modified_base 3: mod_base = OTHER; note = 2'-deoxy-2'-fluorocytidine-3'-phosphate
  modified_base 4: mod_base = OTHER; note = 2'-O-methyladenosine-3'-phosphate
  modified_base 5: mod_base = OTHER; note = 2'-deoxy-2'-fluorocytidine-3'-phosphate
  modified_base 6: mod_base = OTHER; note = 2'-O-methyluridine-3'-phosphate
  modified_base 7: mod_base = OTHER; note = 2'-deoxy-2'-fluorouridine-3'-phosphate
  modified_base 8: mod_base = OTHER; note = 2'-O-methyluridine-3'-phosphate
  modified_base 9: mod_base = OTHER; note = 2'-deoxy-2'-fluorocytidine-3'-phosphate
  modified_base 10: mod_base = OTHER; note = 2'-deoxy-2'-fluoroguanosine-3'-phosphate
  modified_base 11: mod_base = OTHER; note = 2'-deoxy-2'-fluoroadenosine-3'-phosphate
  modified_base 12: mod_base = OTHER; note = 2'-O-methyluridine-3'-phosphate
  modified_base 13: mod_base = OTHER; note = 2'-deoxy-2'-fluorouridine-3'-phosphate
  modified_base 14: mod_base = OTHER; note = 2'-O-methylcytidine-3'-phosphate
  modified_base 15: mod_base = OTHER; note = 2'-deoxy-2'-fluorocytidine-3'-phosphate
  modified_base 16: mod_base = OTHER; note = 2'-O-methyladenosine-3'-phosphate
  modified_base 17: mod_base = OTHER; note = 2'-deoxy-2'-fluorocytidine-3'-phosphate
  modified_base 18: mod_base = OTHER; note = 2'-O-methylcytidine-3'-phosphate
  modified_base 19: mod_base = OTHER; note = 2'-deoxy-2'-fluorouridine-3'-phosphate
  modified_base 20: mod_base = OTHER; note = 2'-O-methyluridine-3'-phosphate
  modified_base 21: mod_base = OTHER; note = 2'-deoxy-2'-fluoroadenosine-3'-phosphate ((2S,4R)-1-[29-[[2-(acetylamino)-2-deoxy-beta-D-galactopyra nosyl]oxy]-14,14-bis[[3-[[3-[[5-[[2-(acetylamino)-2-deoxy-b eta-D-galactopyranosyl]oxy]-1-oxopentyl]amino]propyl]amino] -3-oxopropoxy]methyl]-1,12,19,25-tetraoxo-16-oxa-13,20,24-t riazanonacos-1-yl]-4-hydroxy-2-pyrrolidinyl)methyl ester
aacactttcgattccacctta

SEQ ID NO: 483 - RNA, 21 nt, synthetic construct
  source 1..21: mol_type = other RNA
  modified_base 1: mod_base = OTHER; note = 2'-deoxy-2'-fluoroadenosine-3'-phosphorothioate
  modified_base 2: mod_base = OTHER; note = 2'-O-methylguanosine-3'-phosphorothioate
  modified_base 3: mod_base = OTHER; note = 2'-deoxy-2'-fluoroguanosine-3'-phosphate
  modified_base 4: mod_base = OTHER; note = 2'-O-methyladenosine-3'-phosphate
  modified_base 5: mod_base = OTHER; note = 2'-deoxy-2'-fluoroguanosine-3'-phosphate
  modified_base 6: mod_base = OTHER; note = 2'-O-methylcytidine-3'-phosphate
  modified_base 7: mod_base = OTHER; note = 2'-deoxy-2'-fluoroadenosine-3'-phosphate
  modified_base 8: mod_base = OTHER; note = 2'-O-methyluridine-3'-phosphate
  modified_base 9: mod_base = OTHER; note = 2'-deoxy-2'-fluoroadenosine-3'-phosphate
  modified_base 10: mod_base = OTHER; note = 2'-deoxy-2'-fluoroadenosine-3'-phosphate
  modified_base 11: mod_base = OTHER; note = 2'-deoxy-2'-fluoroguanosine-3'-phosphate
  modified_base 12: mod_base = OTHER; note = 2'-O-methyluridine-3'-phosphate
  modified_base 13: mod_base = OTHER; note = 2'-deoxy-2'-fluoroadenosine-3'-phosphate
  modified_base 14: mod_base = OTHER; note = 2'-O-methylcytidine-3'-phosphate
  modified_base 15: mod_base = OTHER; note = 2'-deoxy-2'-fluoroadenosine-3'-phosphate
  modified_base 16: mod_base = OTHER; note = 2'-O-methyladenosine-3'-phosphate
  modified_base 17: mod_base = OTHER; note = 2'-deoxy-2'-fluoroadenosine-3'-phosphate
  modified_base 18: mod_base = OTHER; note = 2'-O-methylguanosine-3'-phosphate
  modified_base 19: mod_base = OTHER; note = 2'-deoxy-2'-fluorocytidine-3'-phosphate
  modified_base 20: mod_base = OTHER; note = 2'-O-methyluridine-3'-phosphate
  modified_base 21: mod_base = OTHER; note = 2'-deoxy-2'-fluoroadenosine-3'-phosphate ((2S,4R)-1-[29-[[2-(acetylamino)-2-deoxy-beta-D-galactopyra nosyl]oxy]-14,14-bis[[3-[[3-[[5-[[2-(acetylamino)-2-deoxy-b eta-D-galactopyranosyl]oxy]-1-oxopentyl]amino]propyl]amino] -3-oxopropoxy]methyl]-1,12,19,25-tetraoxo-16-oxa-13,20,24-t riazanonacos-1-yl]-4-hydroxy-2-pyrrolidinyl)methyl ester
aggagcataagtacaaagcta

SEQ ID NO: 484 - RNA, 21 nt, synthetic construct
  source 1..21: mol_type = other RNA
  modified_base 1: mod_base = OTHER; note = 2'-deoxy-2'-fluoroguanosine-3'-phosphorothioate
  modified_base 2: mod_base = OTHER; note = 2'-O-methyladenosine-3'-phosphorothioate
  modified_base 3: mod_base = OTHER; note = 2'-deoxy-2'-fluoroguanosine-3'-phosphate
  modified_base 4: mod_base = OTHER; note = 2'-O-methylcytidine-3'-phosphate
  modified_base 5: mod_base = OTHER; note = 2'-deoxy-2'-fluoroadenosine-3'-phosphate
  modified_base 6: mod_base = OTHER; note = 2'-O-methyluridine-3'-phosphate
  modified_base 7: mod_base = OTHER; note = 2'-deoxy-2'-fluoroadenosine-3'-phosphate
  modified_base 8: mod_base = OTHER; note = 2'-O-methyladenosine-3'-phosphate
  modified_base 9: mod_base = OTHER; note = 2'-deoxy-2'-fluoroguanosine-3'-phosphate
  modified_base 10: mod_base = OTHER; note = 2'-deoxy-2'-fluorouridine-3'-phosphate
  modified_base 11: mod_base = OTHER; note = 2'-deoxy-2'-fluoroadenosine-3'-phosphate
  modified_base 12: mod_base = OTHER; note = 2'-O-methylcytidine-3'-phosphate
  modified_base 13: mod_base = OTHER; note = 2'-deoxy-2'-fluoroadenosine-3'-phosphate
  modified_base 14: mod_base = OTHER; note = 2'-O-methyladenosine-3'-phosphate
  modified_base 15: mod_base = OTHER; note = 2'-deoxy-2'-fluoroadenosine-3'-phosphate
  modified_base 16: mod_base = OTHER; note = 2'-O-methylguanosine-3'-phosphate
  modified_base 17: mod_base = OTHER; note = 2'-deoxy-2'-fluorocytidine-3'-phosphate
  modified_base 18: mod_base = OTHER; note = 2'-O-methyluridine-3'-phosphate
  modified_base 19: mod_base = OTHER; note = 2'-deoxy-2'-fluoroguanosine-3'-phosphate
  modified_base 20: mod_base = OTHER; note = 2'-O-methyladenosine-3'-phosphate
  modified_base 21: mod_base = OTHER; note = 2'-deoxy-2'-fluoroadenosine-3'-phosphate ((2S,4R)-1-[29-[[2-(acetylamino)-2-deoxy-beta-D-galactopyra nosyl]oxy]-14,14-bis[[3-[[3-[[5-[[2-(acetylamino)-2-deoxy-b eta-D-galactopyranosyl]oxy]-1-oxopentyl]amino]propyl]amino] -3-oxopropoxy]methyl]-1,12,19,25-tetraoxo-16-oxa-13,20,24-t riazanonacos-1-yl]-4-hydroxy-2-pyrrolidinyl)methyl ester
gagcataagtacaaagctgaa

SEQ ID NO: 485 - RNA, 21 nt, synthetic construct
  source 1..21: mol_type = other RNA
  modified_base 1: mod_base = OTHER; note = 2'-deoxy-2'-fluorouridine-3'-phosphorothioate
  modified_base 2: mod_base = OTHER; note = 2'-O-methyladenosine-3'-phosphorothioate
  modified_base 3: mod_base = OTHER; note = 2'-deoxy-2'-fluoroadenosine-3'-phosphate
  modified_base 4: mod_base = OTHER; note = 2'-O-methylguanosine-3'-phosphate
  modified_base 5: mod_base = OTHER; note = 2'-deoxy-2'-fluorouridine-3'-phosphate
  modified_base 6: mod_base = OTHER; note = 2'-O-methyladenosine-3'-phosphate
  modified_base 7: mod_base = OTHER; note = 2'-deoxy-2'-fluorocytidine-3'-phosphate
  modified_base 8: mod_base = OTHER; note = 2'-O-methyladenosine-3'-phosphate
  modified_base 9: mod_base = OTHER; note = 2'-deoxy-2'-fluoroadenosine-3'-phosphate
  modified_base 10: mod_base = OTHER; note = 2'-deoxy-2'-fluoroadenosine-3'-phosphate
  modified_base 11: mod_base = OTHER; note = 2'-deoxy-2'-fluoroguanosine-3'-phosphate
  modified_base 12: mod_base = OTHER; note = 2'-O-methylcytidine-3'-phosphate
  modified_base 13: mod_base = OTHER; note = 2'-deoxy-2'-fluorouridine-3'-phosphate
  modified_base 14: mod_base = OTHER; note = 2'-O-methylguanosine-3'-phosphate
  modified_base 15: mod_base = OTHER; note = 2'-deoxy-2'-fluoroadenosine-3'-phosphate
  modified_base 16: mod_base = OTHER; note = 2'-O-methyladenosine-3'-phosphate
  modified_base 17: mod_base = OTHER; note = 2'-deoxy-2'-fluoroguanosine-3'-phosphate
  modified_base 18: mod_base = OTHER; note = 2'-O-methyladenosine-3'-phosphate
  modified_base 19: mod_base = OTHER; note = 2'-deoxy-2'-fluoroguanosine-3'-phosphate
  modified_base 20: mod_base = OTHER; note = 2'-O-methylcytidine-3'-phosphate
  modified_base 21: mod_base = OTHER; note = 2'-deoxy-2'-fluoroadenosine-3'-phosphate ((2S,4R)-1-[29-[[2-(acetylamino)-2-deoxy-beta-D-galactopyra nosyl]oxy]-14,14-bis[[3-[[3-[[5-[[2-(acetylamino)-2-deoxy-b eta-D-galactopyranosyl]oxy]-1-oxopentyl]amino]propyl]amino] -3-oxopropoxy]methyl]-1,12,19,25-tetraoxo-16-oxa-13,20,24-t riazanonacos-1-yl]-4-hydroxy-2-pyrrolidinyl)methyl ester
taagtacaaagctgaagagca

SEQ ID NO: 486 - RNA, 21 nt, synthetic construct
  source 1..21: mol_type = other RNA
  modified_base 1: mod_base = OTHER; note = 2'-deoxy-2'-fluoroadenosine-3'-phosphorothioate
  modified_base 2: mod_base = OTHER; note = 2'-O-methyladenosine-3'-phosphorothioate
  modified_base 3: mod_base = OTHER; note = 2'-deoxy-2'-fluoroguanosine-3'-phosphate
  modified_base 4: mod_base = OTHER; note = 2'-O-methyluridine-3'-phosphate
  modified_base 5: mod_base = OTHER; note = 2'-deoxy-2'-fluoroadenosine-3'-phosphate
  modified_base 6: mod_base = OTHER; note = 2'-O-methylcytidine-3'-phosphate
  modified_base 7: mod_base = OTHER; note = 2'-deoxy-2'-fluoroadenosine-3'-phosphate
  modified_base 8: mod_base = OTHER; note = 2'-O-methyladenosine-3'-phosphate
  modified_base 9: mod_base = OTHER; note = 2'-deoxy-2'-fluoroadenosine-3'-phosphate
  modified_base 10: mod_base = OTHER; note = 2'-deoxy-2'-fluoroguanosine-3'-phosphate
  modified_base 11: mod_base = OTHER; note = 2'-deoxy-2'-fluorocytidine-3'-phosphate
  modified_base 12: mod_base = OTHER; note = 2'-O-methyluridine-3'-phosphate
  modified_base 13: mod_base = OTHER; note = 2'-deoxy-2'-fluoroguanosine-3'-phosphate
  modified_base 14: mod_base = OTHER; note = 2'-O-methyladenosine-3'-phosphate
  modified_base 15: mod_base = OTHER; note = 2'-deoxy-2'-fluoroadenosine-3'-phosphate
  modified_base 16: mod_base = OTHER; note = 2'-O-methylguanosine-3'-phosphate
  modified_base 17: mod_base = OTHER; note = 2'-deoxy-2'-fluoroadenosine-3'-phosphate
  modified_base 18: mod_base = OTHER; note = 2'-O-methylguanosine-3'-phosphate
  modified_base 19: mod_base = OTHER; note = 2'-deoxy-2'-fluorocytidine-3'-phosphate
  modified_base 20: mod_base = OTHER; note = 2'-O-methyladenosine-3'-phosphate
  modified_base 21: mod_base = OTHER; note = 2'-deoxy-2'-fluoroadenosine-3'-phosphate ((2S,4R)-1-[29-[[2-(acetylamino)-2-deoxy-beta-D-galactopyra nosyl]oxy]-14,14-bis[[3-[[3-[[5-[[2-(acetylamino)-2-deoxy-b eta-D-galactopyranosyl]oxy]-1-oxopentyl]amino]propyl]amino] -3-oxopropoxy]methyl]-1,12,19,25-tetraoxo-16-oxa-13,20,24-t riazanonacos-1-yl]-4-hydroxy-2-pyrrolidinyl)methyl ester
aagtacaaagctgaagagcaa

SEQ ID NO: 487 - RNA, 21 nt, synthetic construct
  source 1..21: mol_type = other RNA
  modified_base 1: mod_base = OTHER; note = 2'-deoxy-2'-fluorouridine-3'-phosphorothioate
  modified_base 2: mod_base = OTHER; note = 2'-O-methyladenosine-3'-phosphorothioate
  modified_base 3: mod_base = OTHER; note = 2'-deoxy-2'-fluorocytidine-3'-phosphate
  modified_base 4: mod_base = OTHER; note = 2'-O-methylcytidine-3'-phosphate
  modified_base 5: mod_base = OTHER; note = 2'-deoxy-2'-fluoroadenosine-3'-phosphate
  modified_base 6: mod_base = OTHER; note = 2'-O-methylcytidine-3'-phosphate
  modified_base 7: mod_base = OTHER; note = 2'-deoxy-2'-fluoroadenosine-3'-phosphate
  modified_base 8: mod_base = OTHER; note = 2'-O-methyladenosine-3'-phosphate
  modified_base 9: mod_base = OTHER; note = 2'-deoxy-2'-fluoroadenosine-3'-phosphate
  modified_base 10: mod_base = OTHER; note = 2'-deoxy-2'-fluorouridine-3'-phosphate
  modified_base 11: mod_base = OTHER; note = 2'-deoxy-2'-fluoroguanosine-3'-phosphate
  modified_base 12: mod_base = OTHER; note = 2'-O-methyluridine-3'-phosphate
  modified_base 13: mod_base = OTHER; note = 2'-deoxy-2'-fluoroadenosine-3'-phosphate
  modified_base 14: mod_base = OTHER; note = 2'-O-methylcytidine-3'-phosphate
  modified_base 15: mod_base = OTHER; note = 2'-deoxy-2'-fluorocytidine-3'-phosphate
  modified_base 16: mod_base = OTHER; note = 2'-O-methylcytidine-3'-phosphate
  modified_base 17: mod_base = OTHER; note = 2'-deoxy-2'-fluoroadenosine-3'-phosphate
  modified_base 18: mod_base = OTHER; note = 2'-O-methylcytidine-3'-phosphate
  modified_base 19: mod_base = OTHER; note = 2'-deoxy-2'-fluoroadenosine-3'-phosphate
  modified_base 20: mod_base = OTHER; note = 2'-O-methyladenosine-3'-phosphate
  modified_base 21: mod_base = OTHER; note = 2'-deoxy-2'-fluoroadenosine-3'-phosphate ((2S,4R)-1-[29-[[2-(acetylamino)-2-deoxy-beta-D-galactopyra nosyl]oxy]-14,14-bis[[3-[[3-[[5-[[2-(acetylamino)-2-deoxy-b eta-D-galactopyranosyl]oxy]-1-oxopentyl]amino]propyl]amino] -3-oxopropoxy]methyl]-1,12,19,25-tetraoxo-16-oxa-13,20,24-t riazanonacos-1-yl]-4-hydroxy-2-pyrrolidinyl)methyl ester
taccacaaatgtacccacaaa

SEQ ID NO: 488 - RNA, 21 nt, synthetic construct
  source 1..21: mol_type = other RNA
  modified_base 1: mod_base = OTHER; note = 2'-deoxy-2'-fluorocytidine-3'-phosphorothioate
  modified_base 2: mod_base = OTHER; note = 2'-O-methylcytidine-3'-phosphorothioate
  modified_base 3: mod_base = OTHER; note = 2'-deoxy-2'-fluoroadenosine-3'-phosphate
  modified_base 4: mod_base = OTHER; note = 2'-O-methylcytidine-3'-phosphate
  modified_base 5: mod_base = OTHER; note = 2'-deoxy-2'-fluoroadenosine-3'-phosphate
  modified_base 6: mod_base = OTHER; note = 2'-O-methyladenosine-3'-phosphate
  modified_base 7: mod_base = OTHER; note = 2'-deoxy-2'-fluoroadenosine-3'-phosphate
  modified_base 8: mod_base = OTHER; note = 2'-O-methyluridine-3'-phosphate
  modified_base 9: mod_base = OTHER; note = 2'-deoxy-2'-fluoroguanosine-3'-phosphate
  modified_base 10: mod_base = OTHER; note = 2'-deoxy-2'-fluorouridine-3'-phosphate
  modified_base 11: mod_base = OTHER; note = 2'-deoxy-2'-fluoroadenosine-3'-phosphate
  modified_base 12: mod_base = OTHER; note = 2'-O-methylcytidine-3'-phosphate
  modified_base 13: mod_base = OTHER; note = 2'-deoxy-2'-fluorocytidine-3'-phosphate
  modified_base 14: mod_base = OTHER; note = 2'-O-methylcytidine-3'-phosphate
  modified_base 15: mod_base = OTHER; note = 2'-deoxy-2'-fluoroadenosine-3'-phosphate
  modified_base 16: mod_base = OTHER; note = 2'-O-methylcytidine-3'-phosphate
  modified_base 17: mod_base = OTHER; note = 2'-deoxy-2'-fluoroadenosine-3'-phosphate
  modified_base 18: mod_base = OTHER; note = 2'-O-methyladenosine-3'-phosphate
  modified_base 19: mod_base = OTHER; note = 2'-deoxy-2'-fluoroguanosine-3'-phosphate
  modified_base 20: mod_base = OTHER; note = 2'-O-methylguanosine-3'-phosphate
  modified_base 21: mod_base = OTHER; note = 2'-deoxy-2'-fluoroadenosine-3'-phosphate ((2S,4R)-1-[29-[[2-(acetylamino)-2-deoxy-beta-D-galactopyra nosyl]oxy]-14,14-bis[[3-[[3-[[5-[[2-(acetylamino)-2-deoxy-b eta-D-galactopyranosyl]oxy]-1-oxopentyl]amino]propyl]amino] -3-oxopropoxy]methyl]-1,12,19,25-tetraoxo-16-oxa-13,20,24-t riazanonacos-1-yl]-4-hydroxy-2-pyrrolidinyl)methyl ester
ccacaaatgtacccacaagga

SEQ ID NO: 489 - RNA, 21 nt, synthetic construct
  source 1..21: mol_type = other RNA
  modified_base 1: mod_base = OTHER; note = 2'-deoxy-2'-fluorouridine-3'-phosphorothioate
  modified_base 2: mod_base = OTHER; note = 2'-O-methyladenosine-3'-phosphorothioate
  modified_base 3: mod_base = OTHER; note = 2'-deoxy-2'-fluorocytidine-3'-phosphate
  modified_base 4: mod_base = OTHER; note = 2'-O-methyluridine-3'-phosphate
  modified_base 5: mod_base = OTHER; note = 2'-deoxy-2'-fluoroguanosine-3'-phosphate
  modified_base 6: mod_base = OTHER; note = 2'-O-methyluridine-3'-phosphate
  modified_base 7: mod_base = OTHER; note = 2'-deoxy-2'-fluorouridine-3'-phosphate
  modified_base 8: mod_base = OTHER; note = 2'-O-methyluridine-3'-phosphate
  modified_base 9: mod_base = OTHER; note = 2'-deoxy-2'-fluoroguanosine-3'-phosphate
  modified_base 10: mod_base = OTHER; note = 2'-deoxy-2'-fluoroguanosine-3'-phosphate
  modified_base 11: mod_base = OTHER; note = 2'-deoxy-2'-fluoroadenosine-3'-phosphate
  modified_base 12: mod_base = OTHER; note = 2'-O-methylguanosine-3'-phosphate
  modified_base 13: mod_base = OTHER; note = 2'-deoxy-2'-fluorocytidine-3'-phosphate
  modified_base 14: mod_base = OTHER; note = 2'-O-methylcytidine-3'-phosphate
  modified_base 15: mod_base = OTHER; note = 2'-deoxy-2'-fluorocytidine-3'-phosphate
  modified_base 16: mod_base = OTHER; note = 2'-O-methyladenosine-3'-phosphate
  modified_base 17: mod_base = OTHER; note = 2'-deoxy-2'-fluoroadenosine-3'-phosphate
  modified_base 18: mod_base = OTHER; note = 2'-O-methylguanosine-3'-phosphate
  modified_base 19: mod_base = OTHER; note = 2'-deoxy-2'-fluoroadenosine-3'-phosphate
  modified_base 20: mod_base = OTHER; note = 2'-O-methyladenosine-3'-phosphate
  modified_base 21: mod_base = OTHER; note = 2'-deoxy-2'-fluoroadenosine-3'-phosphate ((2S,4R)-1-[29-[[2-(acetylamino)-2-deoxy-beta-D-galactopyra nosyl]oxy]-14,14-bis[[3-[[3-[[5-[[2-(acetylamino)-2-deoxy-b eta-D-galactopyranosyl]oxy]-1-oxopentyl]amino]propyl]amino] -3-oxopropoxy]methyl]-1,12,19,25-tetraoxo-16-oxa-13,20,24-t riazanonacos-1-yl]-4-hydroxy-2-pyrrolidinyl)methyl ester
tactgtttggagcccaagaaa

SEQ ID NO: 490 - RNA, 21 nt, synthetic construct
  source 1..21: mol_type = other RNA
  modified_base 1: mod_base = OTHER; note = 2'-deoxy-2'-fluoroadenosine-3'-phosphorothioate
  modified_base 2: mod_base = OTHER; note = 2'-O-methylcytidine-3'-phosphorothioate
  modified_base 3: mod_base = OTHER; note = 2'-deoxy-2'-fluorouridine-3'-phosphate
  modified_base 4: mod_base = OTHER; note = 2'-O-methylguanosine-3'-phosphate
  modified_base 5: mod_base = OTHER; note = 2'-deoxy-2'-fluorouridine-3'-phosphate
  modified_base 6: mod_base = OTHER; note = 2'-O-methyluridine-3'-phosphate
  modified_base 7: mod_base = OTHER; note = 2'-deoxy-2'-fluorouridine-3'-phosphate
  modified_base 8: mod_base = OTHER; note = 2'-O-methylguanosine-3'-phosphate
  modified_base 9: mod_base = OTHER; note = 2'-deoxy-2'-fluoroguanosine-3'-phosphate
  modified_base 10: mod_base = OTHER; note = 2'-deoxy-2'-fluoroadenosine-3'-phosphate
  modified_base 11: mod_base = OTHER; note = 2'-deoxy-2'-fluoroguanosine-3'-phosphate
  modified_base 12: mod_base = OTHER; note = 2'-O-methylcytidine-3'-phosphate
  modified_base 13: mod_base = OTHER; note = 2'-deoxy-2'-fluorocytidine-3'-phosphate
  modified_base 14: mod_base = OTHER; note = 2'-O-methylcytidine-3'-phosphate
  modified_base 15: mod_base = OTHER; note = 2'-deoxy-2'-fluoroadenosine-3'-phosphate
  modified_base 16: mod_base = OTHER; note = 2'-O-methyladenosine-3'-phosphate
  modified_base 17: mod_base = OTHER; note = 2'-deoxy-2'-fluoroguanosine-3'-phosphate
  modified_base 18: mod_base = OTHER; note = 2'-O-methyladenosine-3'-phosphate
  modified_base 19: mod_base = OTHER; note = 2'-deoxy-2'-fluoroadenosine-3'-phosphate
  modified_base 20: mod_base = OTHER; note = 2'-O-methyladenosine-3'-phosphate
  modified_base 21: mod_base = OTHER; note = 2'-deoxy-2'-fluoroadenosine-3'-phosphate ((2S,4R)-1-[29-[[2-(acetylamino)-2-deoxy-beta-D-galactopyra nosyl]oxy]-14,14-bis[[3-[[3-[[5-[[2-(acetylamino)-2-deoxy-b eta-D-galactopyranosyl]oxy]-1-oxopentyl]amino]propyl]amino] -3-oxopropoxy]methyl]-1,12,19,25-tetraoxo-16-oxa-13,20,24-t riazanonacos-1-yl]-4-hydroxy-2-pyrrolidinyl)methyl ester
actgtttggagcccaagaaaa

SEQ ID NO: 491 - RNA, 21 nt, synthetic construct
  source 1..21: mol_type = other RNA
  modified_base 1: mod_base = OTHER; note = 2'-deoxy-2'-fluorocytidine-3'-phosphorothioate
  modified_base 2: mod_base = OTHER; note = 2'-O-methyluridine-3'-phosphorothioate
  modified_base 3: mod_base = OTHER; note = 2'-deoxy-2'-fluoroguanosine-3'-phosphate
  modified_base 4: mod_base = OTHER; note = 2'-O-methyluridine-3'-phosphate
  modified_base 5: mod_base = OTHER; note = 2'-deoxy-2'-fluorouridine-3'-phosphate
  modified_base 6: mod_base = OTHER; note = 2'-O-methyluridine-3'-phosphate
  modified_base 7: mod_base = OTHER; note = 2'-deoxy-2'-fluoroguanosine-3'-phosphate
  modified_base 8: mod_base = OTHER; note = 2'-O-methylguanosine-3'-phosphate
  modified_base 9: mod_base = OTHER; note = 2'-deoxy-2'-fluoroadenosine-3'-phosphate
  modified_base 10: mod_base = OTHER; note = 2'-deoxy-2'-fluoroguanosine-3'-phosphate
  modified_base 11: mod_base = OTHER; note = 2'-deoxy-2'-fluorocytidine-3'-phosphate
  modified_base 12: mod_base = OTHER; note = 2'-O-methylcytidine-3'-phosphate
  modified_base 13: mod_base = OTHER; note = 2'-deoxy-2'-fluorocytidine-3'-phosphate
  modified_base 14: mod_base = OTHER; note = 2'-O-methyladenosine-3'-phosphate
  modified_base 15: mod_base = OTHER; note = 2'-deoxy-2'-fluoroadenosine-3'-phosphate
  modified_base 16: mod_base = OTHER; note = 2'-O-methylguanosine-3'-phosphate
  modified_base 17: mod_base = OTHER; note = 2'-deoxy-2'-fluoroadenosine-3'-phosphate
  modified_base 18: mod_base = OTHER; note = 2'-O-methyladenosine-3'-phosphate
  modified_base 19: mod_base = OTHER; note = 2'-deoxy-2'-fluoroadenosine-3'-phosphate
  modified_base 20: mod_base = OTHER; note = 2'-O-methylguanosine-3'-phosphate
  modified_base 21: mod_base = OTHER; note = 2'-deoxy-2'-fluorouridine-3'-phosphate ((2S,4R)-1-[29-[[2-(acetylamino)-2-deoxy-beta-D-galactopyra nosyl]oxy]-14,14-bis[[3-[[3-[[5-[[2-(acetylamino)-2-deoxy-b eta-D-galactopyranosyl]oxy]-1-oxopentyl]amino]propyl]amino] -3-oxopropoxy]methyl]-1,12,19,25-tetraoxo-16-oxa-13,20,24-t riazanonacos-1-yl]-4-hydroxy-2-pyrrolidinyl)methyl ester
ctgtttggagcccaagaaagt

SEQ ID NO: 492 - RNA, 21 nt, synthetic construct
  source 1..21: mol_type = other RNA
  modified_base 1: mod_base = OTHER; note = 2'-deoxy-2'-fluoroguanosine-3'-phosphorothioate
  modified_base 2: mod_base = OTHER; note = 2'-O-methylguanosine-3'-phosphorothioate
  modified_base 3: mod_base = OTHER; note = 2'-deoxy-2'-fluoroadenosine-3'-phosphate
  modified_base 4: mod_base = OTHER; note = 2'-O-methylguanosine-3'-phosphate
  modified_base 5: mod_base = OTHER; note = 2'-deoxy-2'-fluorocytidine-3'-phosphate
  modified_base 6: mod_base = OTHER; note = 2'-O-methylcytidine-3'-phosphate
  modified_base 7: mod_base = OTHER; note = 2'-deoxy-2'-fluorocytidine-3'-phosphate
  modified_base 8: mod_base = OTHER; note = 2'-O-methyladenosine-3'-phosphate
  modified_base 9: mod_base = OTHER; note = 2'-deoxy-2'-fluoroadenosine-3'-phosphate
  modified_base 10: mod_base = OTHER; note = 2'-deoxy-2'-fluoroguanosine-3'-phosphate
  modified_base 11: mod_base = OTHER; note = 2'-deoxy-2'-fluoroadenosine-3'-phosphate
  modified_base 12: mod_base = OTHER; note = 2'-O-methyladenosine-3'-phosphate
  modified_base 13: mod_base = OTHER; note = 2'-deoxy-2'-fluoroadenosine-3'-phosphate
  modified_base 14: mod_base = OTHER; note = 2'-O-methylguanosine-3'-phosphate
  modified_base 15: mod_base = OTHER; note = 2'-deoxy-2'-fluorouridine-3'-phosphate
  modified_base 16: mod_base = OTHER; note = 2'-O-methylguanosine-3'-phosphate
  modified_base 17: mod_base = OTHER; note = 2'-deoxy-2'-fluoroadenosine-3'-phosphate
  modified_base 18: mod_base = OTHER; note = 2'-O-methyladenosine-3'-phosphate
  modified_base 19: mod_base = OTHER; note = 2'-deoxy-2'-fluoroadenosine-3'-phosphate
  modified_base 20: mod_base = OTHER; note = 2'-O-methylguanosine-3'-phosphate
  modified_base 21: mod_base = OTHER; note = 2'-deoxy-2'-fluoroadenosine-3'-phosphate ((2S,4R)-1-[29-[[2-(acetylamino)-2-deoxy-beta-D-galactopyra nosyl]oxy]-14,14-bis[[3-[[3-[[5-[[2-(acetylamino)-2-deoxy-b eta-D-galactopyranosyl]oxy]-1-oxopentyl]amino]propyl]amino] -3-oxopropoxy]methyl]-1,12,19,25-tetraoxo-16-oxa-13,20,24-t riazanonacos-1-yl]-4-hydroxy-2-pyrrolidinyl)methyl ester
ggagcccaagaaagtgaaaga

SEQ ID NO: 493 - RNA, 21 nt, synthetic construct
  source 1..21: mol_type = other RNA
  modified_base 1: mod_base = OTHER; note = 2'-deoxy-2'-fluoroguanosine-3'-phosphorothioate
  modified_base 2: mod_base = OTHER; note = 2'-O-methyladenosine-3'-phosphorothioate
  modified_base 3: mod_base = OTHER; note = 2'-deoxy-2'-fluoroguanosine-3'-phosphate
  modified_base 4: mod_base = OTHER; note = 2'-O-methylcytidine-3'-phosphate
  modified_base 5: mod_base = OTHER; note = 2'-deoxy-2'-fluorocytidine-3'-phosphate
  modified_base 6: mod_base = OTHER; note = 2'-O-methylcytidine-3'-phosphate
  modified_base 7: mod_base = OTHER; note = 2'-deoxy-2'-fluoroadenosine-3'-phosphate
  modified_base 8: mod_base = OTHER; note = 2'-O-methyladenosine-3'-phosphate
  modified_base 9: mod_base = OTHER; note = 2'-deoxy-2'-fluoroguanosine-3'-phosphate
  modified_base 10: mod_base = OTHER; note = 2'-deoxy-2'-fluoroadenosine-3'-phosphate
  modified_base 11: mod_base = OTHER; note = 2'-deoxy-2'-fluoroadenosine-3'-phosphate
  modified_base 12: mod_base = OTHER; note = 2'-O-methyladenosine-3'-phosphate
  modified_base 13: mod_base = OTHER; note = 2'-deoxy-2'-fluoroguanosine-3'-phosphate
  modified_base 14: mod_base = OTHER; note = 2'-O-methyluridine-3'-phosphate
  modified_base 15: mod_base = OTHER; note = 2'-deoxy-2'-fluoroguanosine-3'-phosphate
  modified_base 16: mod_base = OTHER; note = 2'-O-methyladenosine-3'-phosphate
  modified_base 17: mod_base = OTHER; note = 2'-deoxy-2'-fluoroadenosine-3'-phosphate
  modified_base 18: mod_base = OTHER; note = 2'-O-methyladenosine-3'-phosphate
  modified_base 19: mod_base = OTHER; note = 2'-deoxy-2'-fluoroguanosine-3'-phosphate
  modified_base 20: mod_base = OTHER; note = 2'-O-methyladenosine-3'-phosphate
  modified_base 21: mod_base = OTHER; note = 2'-deoxy-2'-fluoroadenosine-3'-phosphate ((2S,4R)-1-[29-[[2-(acetylamino)-2-deoxy-beta-D-galactopyra nosyl]oxy]-14,14-bis[[3-[[3-[[5-[[2-(acetylamino)-2-deoxy-b eta-D-galactopyranosyl]oxy]-1-oxopentyl]amino]propyl]amino] -3-oxopropoxy]methyl]-1,12,19,25-tetraoxo-16-oxa-13,20,24-t riazanonacos-1-yl]-4-hydroxy-2-pyrrolidinyl)methyl ester
gagcccaagaaagtgaaagaa

SEQ ID NO: 494 - RNA, 21 nt, synthetic construct
  source 1..21: mol_type = other RNA
  modified_base 1: mod_base = OTHER; note = 2'-deoxy-2'-fluoroadenosine-3'-phosphorothioate
  modified_base 2: mod_base = OTHER; note = 2'-O-methylguanosine-3'-phosphorothioate
  modified_base 3: mod_base = OTHER; note = 2'-deoxy-2'-fluorocytidine-3'-phosphate
  modified_base 4: mod_base = OTHER; note = 2'-O-methylcytidine-3'-phosphate
  modified_base 5: mod_base = OTHER; note = 2'-deoxy-2'-fluorocytidine-3'-phosphate
  modified_base 6: mod_base = OTHER; note = 2'-O-methyladenosine-3'-phosphate
  modified_base 7: mod_base = OTHER; note = 2'-deoxy-2'-fluoroadenosine-3'-phosphate
  modified_base 8: mod_base = OTHER; note = 2'-O-methylguanosine-3'-phosphate
  modified_base 9: mod_base = OTHER; note = 2'-deoxy-2'-fluoroadenosine-3'-phosphate
  modified_base 10: mod_base = OTHER; note = 2'-deoxy-2'-fluoroadenosine-3'-phosphate
  modified_base 11: mod_base = OTHER; note = 2'-deoxy-2'-fluoroadenosine-3'-phosphate
  modified_base 12: mod_base = OTHER; note = 2'-O-methylguanosine-3'-phosphate
  modified_base 13: mod_base = OTHER; note = 2'-deoxy-2'-fluorouridine-3'-phosphate
  modified_base 14: mod_base = OTHER; note = 2'-O-methylguanosine-3'-phosphate
  modified_base 15: mod_base = OTHER; note = 2'-deoxy-2'-fluoroadenosine-3'-phosphate
  modified_base 16: mod_base = OTHER; note = 2'-O-methyladenosine-3'-phosphate
  modified_base 17: mod_base = OTHER; note = 2'-deoxy-2'-fluoroadenosine-3'-phosphate
  modified_base 18: mod_base = OTHER; note = 2'-O-methylguanosine-3'-phosphate
  modified_base 19: mod_base = OTHER; note = 2'-deoxy-2'-fluoroadenosine-3'-phosphate
  modified_base 20: mod_base = OTHER; note = 2'-O-methylcytidine-3'-phosphate
  modified_base 21: mod_base = OTHER; note = 2'-deoxy-2'-fluoroadenosine-3'-phosphate ((2S,4R)-1-[29-[[2-(acetylamino)-2-deoxy-beta-D-galactopyra nosyl]oxy]-14,14-bis[[3-[[3-[[5-[[2-(acetylamino)-2-deoxy-b eta-D-galactopyranosyl]oxy]-1-oxopentyl]amino]propyl]amino] -3-oxopropoxy]methyl]-1,12,19,25-tetraoxo-16-oxa-13,20,24-t riazanonacos-1-yl]-4-hydroxy-2-pyrrolidinyl)methyl ester
agcccaagaaagtgaaagaca

SEQ ID NO: 495 - RNA, 21 nt, synthetic construct
  source 1..21: mol_type = other RNA
  modified_base 1: mod_base = OTHER; note = 2'-deoxy-2'-fluoroguanosine-3'-phosphorothioate
  modified_base 2: mod_base = OTHER; note = 2'-O-methylcytidine-3'-phosphorothioate
  modified_base 3: mod_base = OTHER; note = 2'-deoxy-2'-fluorocytidine-3'-phosphate
  modified_base 4: mod_base = OTHER; note = 2'-O-methylcytidine-3'-phosphate
  modified_base 5: mod_base = OTHER; note = 2'-deoxy-2'-fluoroadenosine-3'-phosphate
  modified_base 6: mod_base = OTHER; note = 2'-O-methyladenosine-3'-phosphate
  modified_base 7: mod_base = OTHER; note = 2'-deoxy-2'-fluoroguanosine-3'-phosphate
  modified_base 8: mod_base = OTHER; note = 2'-O-methyladenosine-3'-phosphate
  modified_base 9: mod_base = OTHER; note = 2'-deoxy-2'-fluoroadenosine-3'-phosphate
  modified_base 10: mod_base = OTHER; note = 2'-deoxy-2'-fluoroadenosine-3'-phosphate
  modified_base 11: mod_base = OTHER; note = 2'-deoxy-2'-fluoroguanosine-3'-phosphate
  modified_base 12: mod_base = OTHER; note = 2'-O-methyluridine-3'-phosphate
  modified_base 13: mod_base = OTHER; note = 2'-deoxy-2'-fluoroguanosine-3'-phosphate
  modified_base 14: mod_base = OTHER; note = 2'-O-methyladenosine-3'-phosphate
  modified_base 15: mod_base = OTHER; note = 2'-deoxy-2'-fluoroadenosine-3'-phosphate
  modified_base 16: mod_base = OTHER; note = 2'-O-methyladenosine-3'-phosphate
  modified_base 17: mod_base = OTHER; note = 2'-deoxy-2'-fluoroguanosine-3'-phosphate
  modified_base 18: mod_base = OTHER; note = 2'-O-methyladenosine-3'-phosphate
  modified_base 19: mod_base = OTHER; note = 2'-deoxy-2'-fluorocytidine-3'-phosphate
  modified_base 20: mod_base = OTHER; note = 2'-O-methylcytidine-3'-phosphate
  modified_base 21: mod_base = OTHER; note = 2'-deoxy-2'-fluoroadenosine-3'-phosphate ((2S,4R)-1-[29-[[2-(acetylamino)-2-deoxy-beta-D-galactopyra nosyl]oxy]-14,14-bis[[3-[[3-[[5-[[2-(acetylamino)-2-deoxy-b eta-D-galactopyranosyl]oxy]-1-oxopentyl]amino]propyl]amino] -3-oxopropoxy]methyl]-1,12,19,25-tetraoxo-16-oxa-13,20,24-t riazanonacos-1-yl]-4-hydroxy-2-pyrrolidinyl)methyl ester
gcccaagaaagtgaaagacca

SEQ ID NO: 496 - RNA, 21 nt, synthetic construct
  source 1..21: mol_type = other RNA
  modified_base 1: mod_base = OTHER; note = 2'-deoxy-2'-fluorocytidine-3'-phosphorothioate
  modified_base 2: mod_base = OTHER; note = 2'-O-methylcytidine-3'-phosphorothioate
  modified_base 3: mod_base = OTHER; note = 2'-deoxy-2'-fluorocytidine-3'-phosphate
  modified_base 4: mod_base = OTHER; note = 2'-O-methyladenosine-3'-phosphate
  modified_base 5: mod_base = OTHER; note = 2'-deoxy-2'-fluoroadenosine-3'-phosphate
  modified_base 6: mod_base = OTHER; note = 2'-O-methylguanosine-3'-phosphate
  modified_base 7: mod_base = OTHER; note = 2'-deoxy-2'-fluoroadenosine-3'-phosphate
  modified_base 8: mod_base = OTHER; note = 2'-O-methyladenosine-3'-phosphate
  modified_base 9: mod_base = OTHER; note = 2'-deoxy-2'-fluoroadenosine-3'-phosphate
  modified_base 10: mod_base = OTHER; note = 2'-deoxy-2'-fluoroguanosine-3'-phosphate
  modified_base 11: mod_base = OTHER; note = 2'-deoxy-2'-fluorouridine-3'-phosphate
  modified_base 12: mod_base = OTHER; note = 2'-O-methylguanosine-3'-phosphate
  modified_base 13: mod_base = OTHER; note = 2'-deoxy-2'-fluoroadenosine-3'-phosphate
  modified_base 14: mod_base = OTHER; note = 2'-O-methyladenosine-3'-phosphate
  modified_base 15: mod_base = OTHER; note = 2'-deoxy-2'-fluoroadenosine-3'-phosphate
  modified_base 16: mod_base = OTHER; note = 2'-O-methylguanosine-3'-phosphate
  modified_base 17: mod_base = OTHER; note = 2'-deoxy-2'-fluoroadenosine-3'-phosphate
  modified_base 18: mod_base = OTHER; note = 2'-O-methylcytidine-3'-phosphate
  modified_base 19: mod_base = OTHER; note = 2'-deoxy-2'-fluorocytidine-3'-phosphate
  modified_base 20: mod_base = OTHER; note = 2'-O-methyladenosine-3'-phosphate
  modified_base 21: mod_base = OTHER; note = 2'-deoxy-2'-fluoroadenosine-3'-phosphate ((2S,4R)-1-[29-[[2-(acetylamino)-2-deoxy-beta-D-galactopyra nosyl]oxy]-14,14-bis[[3-[[3-[[5-[[2-(acetylamino)-2-deoxy-b eta-D-galactopyranosyl]oxy]-1-oxopentyl]amino]propyl]amino] -3-oxopropoxy]methyl]-1,12,19,25-tetraoxo-16-oxa-13,20,24-t riazanonacos-1-yl]-4-hydroxy-2-pyrrolidinyl)methyl ester
cccaagaaagtgaaagaccaa

SEQ ID NO: 497 - RNA, 21 nt, synthetic construct
  source 1..21: mol_type = other RNA
  modified_base 1: mod_base = OTHER; note = 2'-deoxy-2'-fluorocytidine-3'-phosphorothioate
  modified_base 2: mod_base = OTHER; note = 2'-O-methyladenosine-3'-phosphorothioate
  modified_base 3: mod_base = OTHER; note = 2'-deoxy-2'-fluoroadenosine-3'-phosphate
  modified_base 4: mod_base = OTHER; note = 2'-O-methylguanosine-3'-phosphate
  modified_base 5: mod_base = OTHER; note = 2'-deoxy-2'-fluoroadenosine-3'-phosphate
  modified_base 6: mod_base = OTHER; note = 2'-O-methyladenosine-3'-phosphate
  modified_base 7: mod_base = OTHER; note = 2'-deoxy-2'-fluoroadenosine-3'-phosphate
  modified_base 8: mod_base = OTHER; note = 2'-O-methylguanosine-3'-phosphate
  modified_base 9: mod_base = OTHER; note = 2'-deoxy-2'-fluorouridine-3'-phosphate
  modified_base 10: mod_base = OTHER; note = 2'-deoxy-2'-fluoroguanosine-3'-phosphate
  modified_base 11: mod_base = OTHER; note = 2'-deoxy-2'-fluoroadenosine-3'-phosphate
  modified_base 12: mod_base = OTHER; note = 2'-O-methyladenosine-3'-phosphate
  modified_base 13: mod_base = OTHER; note = 2'-deoxy-2'-fluoroadenosine-3'-phosphate
  modified_base 14: mod_base = OTHER; note = 2'-O-methylguanosine-3'-phosphate
  modified_base 15: mod_base = OTHER; note = 2'-deoxy-2'-fluoroadenosine-3'-phosphate
  modified_base 16: mod_base = OTHER; note = 2'-O-methylcytidine-3'-phosphate
  modified_base 17: mod_base = OTHER; note = 2'-deoxy-2'-fluorocytidine-3'-phosphate
  modified_base 18: mod_base = OTHER; note = 2'-O-methyladenosine-3'-phosphate
  modified_base 19: mod_base = OTHER; note = 2'-deoxy-2'-fluorouridine-3'-phosphate
  modified_base 20: mod_base = OTHER; note = 2'-O-methyluridine-3'-phosphate
  modified_base 21: mod_base = OTHER; note = 2'-deoxy-2'-fluoroadenosine-3'-phosphate ((2S,4R)-1-[29-[[2-(acetylamino)-2-deoxy-beta-D-galactopyra nosyl]oxy]-14,14-bis[[3-[[3-[[5-[[2-(acetylamino)-2-deoxy-b eta-D-galactopyranosyl]oxy]-1-oxopentyl]amino]propyl]amino] -3-oxopropoxy]methyl]-1,12,19,25-tetraoxo-16-oxa-13,20,24-t riazanonacos-1-yl]-4-hydroxy-2-pyrrolidinyl)methyl ester
caagaaagtgaaagaccatta

SEQ ID NO: 498 - RNA, 21 nt, synthetic construct
  source 1..21: mol_type = other RNA
  modified_base 1: mod_base = OTHER; note = 2'-deoxy-2'-fluoroguanosine-3'-phosphorothioate
  modified_base 2: mod_base = OTHER; note = 2'-O-methyladenosine-3'-phosphorothioate
  modified_base 3: mod_base = OTHER; note = 2'-deoxy-2'-fluoroadenosine-3'-phosphate
  modified_base 4: mod_base = OTHER; note = 2'-O-methyladenosine-3'-phosphate
  modified_base 5: mod_base = OTHER; note = 2'-deoxy-2'-fluoroguanosine-3'-phosphate
  modified_base 6: mod_base = OTHER; note = 2'-O-methyluridine-3'-phosphate
  modified_base 7: mod_base = OTHER; note = 2'-deoxy-2'-fluoroguanosine-3'-phosphate
  modified_base 8: mod_base = OTHER; note = 2'-O-methyladenosine-3'-phosphate
  modified_base 9: mod_base = OTHER; note = 2'-deoxy-2'-fluoroadenosine-3'-phosphate
  modified_base 10: mod_base = OTHER; note = 2'-deoxy-2'-fluoroadenosine-3'-phosphate
  modified_base 11: mod_base = OTHER; note = 2'-deoxy-2'-fluoroguanosine-3'-phosphate
  modified_base 12: mod_base = OTHER; note = 2'-O-methyladenosine-3'-phosphate
  modified_base 13: mod_base = OTHER; note = 2'-deoxy-2'-fluorocytidine-3'-phosphate
  modified_base 14: mod_base = OTHER; note = 2'-O-methylcytidine-3'-phosphate
  modified_base 15: mod_base = OTHER; note = 2'-deoxy-2'-fluoroadenosine-3'-phosphate
  modified_base 16: mod_base = OTHER; note = 2'-O-methyluridine-3'-phosphate
  modified_base 17: mod_base = OTHER; note = 2'-deoxy-2'-fluorouridine-3'-phosphate
  modified_base 18: mod_base = OTHER; note = 2'-O-methylguanosine-3'-phosphate
  modified_base 19: mod_base = OTHER; note = 2'-deoxy-2'-fluorocytidine-3'-phosphate
  modified_base 20: mod_base = OTHER; note = 2'-O-methyladenosine-3'-phosphate
  modified_base 21: mod_base = OTHER; note = 2'-deoxy-2'-fluoroadenosine-3'-phosphate ((2S,4R)-1-[29-[[2-(acetylamino)-2-deoxy-beta-D-galactopyra nosyl]oxy]-14,14-bis[[3-[[3-[[5-[[2-(acetylamino)-2-deoxy-b eta-D-galactopyranosyl]oxy]-1-oxopentyl]amino]propyl]amino] -3-oxopropoxy]methyl]-1,12,19,25-tetraoxo-16-oxa-13,20,24-t riazanonacos-1-yl]-4-hydroxy-2-pyrrolidinyl)methyl ester
gaaagtgaaagaccattgcaa

SEQ ID NO: 499 - RNA, 21 nt, synthetic construct
  source 1..21: mol_type = other RNA
  modified_base 1: mod_base = OTHER; note = 2'-deoxy-2'-fluoroadenosine-3'-phosphorothioate
  modified_base 2: mod_base = OTHER; note = 2'-O-methyladenosine-3'-phosphorothioate
  modified_base 3: mod_base = OTHER; note = 2'-deoxy-2'-fluoroadenosine-3'-phosphate
  modified_base 4: mod_base = OTHER; note = 2'-O-methylguanosine-3'-phosphate
  modified_base 5: mod_base = OTHER; note = 2'-deoxy-2'-fluorouridine-3'-phosphate
  modified_base 6: mod_base = OTHER; note = 2'-O-methylguanosine-3'-phosphate
  modified_base 7: mod_base = OTHER; note = 2'-deoxy-2'-fluoroadenosine-3'-phosphate
  modified_base 8: mod_base = OTHER; note = 2'-O-methyladenosine-3'-phosphate
  modified_base 9: mod_base = OTHER; note = 2'-deoxy-2'-fluoroadenosine-3'-phosphate
  modified_base 10: mod_base = OTHER; note = 2'-deoxy-2'-fluoroguanosine-3'-phosphate
  modified_base 11: mod_base = OTHER; note = 2'-deoxy-2'-fluoroadenosine-3'-phosphate
  modified_base 12: mod_base = OTHER; note = 2'-O-methylcytidine-3'-phosphate
  modified_base 13: mod_base = OTHER; note = 2'-deoxy-2'-fluorocytidine-3'-phosphate
  modified_base 14: mod_base = OTHER; note = 2'-O-methyladenosine-3'-phosphate
  modified_base 15: mod_base = OTHER; note = 2'-deoxy-2'-fluorouridine-3'-phosphate
  modified_base 16: mod_base = OTHER; note = 2'-O-methyluridine-3'-phosphate
  modified_base 17: mod_base = OTHER; note = 2'-deoxy-2'-fluoroguanosine-3'-phosphate
  modified_base 18: mod_base = OTHER; note = 2'-O-methylcytidine-3'-phosphate
  modified_base 19: mod_base = OTHER; note = 2'-deoxy-2'-fluoroadenosine-3'-phosphate
  modified_base 20: mod_base = OTHER; note = 2'-O-methylguanosine-3'-phosphate
  modified_base 21: mod_base = OTHER; note = 2'-deoxy-2'-fluoroadenosine-3'-phosphate ((2S,4R)-1-[29-[[2-(acetylamino)-2-deoxy-beta-D-galactopyra nosyl]oxy]-14,14-bis[[3-[[3-[[5-[[2-(acetylamino)-2-deoxy-b eta-D-galactopyranosyl]oxy]-1-oxopentyl]amino]propyl]amino] -3-oxopropoxy]methyl]-1,12,19,25-tetraoxo-16-oxa-13,20,24-t riazanonacos-1-yl]-4-hydroxy-2-pyrrolidinyl)methyl ester
aaagtgaaagaccattgcaga

SEQ ID NO: 500 - RNA, 21 nt, synthetic construct
  source 1..21: mol_type = other RNA
  modified_base 1: mod_base = OTHER; note = 2'-deoxy-2'-fluorouridine-3'-phosphorothioate
  modified_base 2: mod_base = OTHER; note = 2'-O-methylcytidine-3'-phosphorothioate
  modified_base 3: mod_base = OTHER; note = 2'-deoxy-2'-fluoroadenosine-3'-phosphate
  modified_base 4: mod_base = OTHER; note = 2'-O-methylcytidine-3'-phosphate
  modified_base 5: mod_base = OTHER; note = 2'-deoxy-2'-fluorouridine-3'-phosphate
  modified_base 6: mod_base = OTHER; note = 2'-O-methylguanosine-3'-phosphate
  modified_base 7: mod_base = OTHER; note = 2'-deoxy-2'-fluoroguanosine-3'-phosphate
  modified_base 8: mod_base = OTHER; note = 2'-O-methyladenosine-3'-phosphate
  modified_base 9: mod_base = OTHER; note = 2'-deoxy-2'-fluoroadenosine-3'-phosphate
  modified_base 10: mod_base = OTHER; note = 2'-deoxy-2'-fluoroadenosine-3'-phosphate
  modified_base 11: mod_base = OTHER; note = 2'-deoxy-2'-fluorocytidine-3'-phosphate
  modified_base 12: mod_base = OTHER; note = 2'-O-methylcytidine-3'-phosphate
  modified_base 13: mod_base = OTHER; note = 2'-deoxy-2'-fluoroadenosine-3'-phosphate
  modified_base 14: mod_base = OTHER; note = 2'-O-methylcytidine-3'-phosphate
  modified_base 15: mod_base = OTHER; note = 2'-deoxy-2'-fluorouridine-3'-phosphate
  modified_base 16: mod_base = OTHER; note = 2'-O-methylguanosine-3'-phosphate
  modified_base 17: mod_base = OTHER; note = 2'-deoxy-2'-fluorocytidine-3'-phosphate
  modified_base 18: mod_base = OTHER; note = 2'-O-methylcytidine-3'-phosphate
  modified_base 19: mod_base = OTHER; note = 2'-deoxy-2'-fluoroadenosine-3'-phosphate
  modified_base 20: mod_base = OTHER; note = 2'-O-methylguanosine-3'-phosphate
  modified_base 21: mod_base = OTHER; note = 2'-deoxy-2'-fluoroadenosine-3'-phosphate ((2S,4R)-1-[29-[[2-(acetylamino)-2-deoxy-beta-D-galactopyra nosyl]oxy]-14,14-bis[[3-[[3-[[5-[[2-(acetylamino)-2-deoxy-b eta-D-galactopyranosyl]oxy]-1-oxopentyl]amino]propyl]amino] -3-oxopropoxy]methyl]-1,12,19,25-tetraoxo-16-oxa-13,20,24-t riazanonacos-1-yl]-4-hydroxy-2-pyrrolidinyl)methyl ester
tcactggaaaccactgccaga

SEQ ID NO: 501 - RNA, 21 nt, synthetic construct
  source 1..21: mol_type = other RNA
  modified_base 1: mod_base = OTHER; note = 2'-deoxy-2'-fluoroadenosine-3'-phosphorothioate
  modified_base 2: mod_base = OTHER; note = 2'-O-methylcytidine-3'-phosphorothioate
  modified_base 3: mod_base = OTHER; note = 2'-deoxy-2'-fluorouridine-3'-phosphate
  modified_base 4: mod_base = OTHER; note = 2'-O-methylguanosine-3'-phosphate
  modified_base 5: mod_base = OTHER; note = 2'-deoxy-2'-fluorocytidine-3'-phosphate
  modified_base 6: mod_base = OTHER; note = 2'-O-methylcytidine-3'-phosphate
  modified_base 7: mod_base = OTHER; note = 2'-deoxy-2'-fluoroadenosine-3'-phosphate
  modified_base 8: mod_base = OTHER; note = 2'-O-methylguanosine-3'-phosphate
  modified_base 9: mod_base = OTHER; note = 2'-deoxy-2'-fluoroadenosine-3'-phosphate
  modified_base 10: mod_base = OTHER; note = 2'-deoxy-2'-fluoroadenosine-3'-phosphate
  modified_base 11: mod_base = OTHER; note = 2'-deoxy-2'-fluoroadenosine-3'-phosphate
  modified_base 12: mod_base = OTHER; note = 2'-O-methylguanosine-3'-phosphate
  modified_base 13: mod_base = OTHER; note = 2'-deoxy-2'-fluoroadenosine-3'-phosphate
  modified_base 14: mod_base = OTHER; note = 2'-O-methylguanosine-3'-phosphate
  modified_base 15: mod_base = OTHER; note = 2'-deoxy-2'-fluoroadenosine-3'-phosphate
  modified_base 16: mod_base = OTHER; note = 2'-O-methyladenosine-3'-phosphate
  modified_base 17: mod_base = OTHER; note = 2'-deoxy-2'-fluoroguanosine-3'-phosphate
  modified_base 18: mod_base = OTHER; note = 2'-O-methyluridine-3'-phosphate
  modified_base 19: mod_base = OTHER; note = 2'-deoxy-2'-fluoroguanosine-3'-phosphate
  modified_base 20: mod_base = OTHER; note = 2'-O-methylcytidine-3'-phosphate
  modified_base 21: mod_base = OTHER; note = 2'-deoxy-2'-fluorouridine-3'-phosphate ((2S,4R)-1-[29-[[2-(acetylamino)-2-deoxy-beta-D-galactopyra nosyl]oxy]-14,14-bis[[3-[[3-[[5-[[2-(acetylamino)-2-deoxy-b eta-D-galactopyranosyl]oxy]-1-oxopentyl]amino]propyl]amino] -3-oxopropoxy]methyl]-1,12,19,25-tetraoxo-16-oxa-13,20,24-t riazanonacos-1-yl]-4-hydroxy-2-pyrrolidinyl)methyl ester
actgccagaaagagaagtgct

SEQ ID NO: 502 - RNA, 21 nt, synthetic construct
  source 1..21: mol_type = other RNA
  modified_base 1: mod_base = OTHER; note = 2'-deoxy-2'-fluorocytidine-3'-phosphorothioate
  modified_base 2: mod_base = OTHER; note = 2'-O-methyluridine-3'-phosphorothioate
  modified_base 3: mod_base = OTHER; note = 2'-deoxy-2'-fluoroguanosine-3'-phosphate
  modified_base 4: mod_base = OTHER; note = 2'-O-methylcytidine-3'-phosphate
  modified_base 5: mod_base = OTHER; note = 2'-deoxy-2'-fluorocytidine-3'-phosphate
  modified_base 6: mod_base = OTHER; note = 2'-O-methyladenosine-3'-phosphate
  modified_base 7: mod_base = OTHER; note = 2'-deoxy-2'-fluoroguanosine-3'-phosphate
  modified_base 8: mod_base = OTHER; note = 2'-O-methyladenosine-3'-phosphate
  modified_base 9: mod_base = OTHER; note = 2'-deoxy-2'-fluoroadenosine-3'-phosphate
  modified_base 10: mod_base = OTHER; note = 2'-deoxy-2'-fluoroadenosine-3'-phosphate
  modified_base 11: mod_base = OTHER; note = 2'-deoxy-2'-fluoroguanosine-3'-phosphate
  modified_base 12: mod_base = OTHER; note = 2'-O-methyladenosine-3'-phosphate
  modified_base 13: mod_base = OTHER; note = 2'-deoxy-2'-fluoroguanosine-3'-phosphate
  modified_base 14: mod_base = OTHER; note = 2'-O-methyladenosine-3'-phosphate
  modified_base 15: mod_base = OTHER; note = 2'-deoxy-2'-fluoroadenosine-3'-phosphate
  modified_base 16: mod_base = OTHER; note = 2'-O-methylguanosine-3'-phosphate
  modified_base 17: mod_base = OTHER; note = 2'-deoxy-2'-fluorouridine-3'-phosphate
  modified_base 18: mod_base = OTHER; note = 2'-O-methylguanosine-3'-phosphate
  modified_base 19: mod_base = OTHER; note = 2'-deoxy-2'-fluorocytidine-3'-phosphate
  modified_base 20: mod_base = OTHER; note = 2'-O-methyluridine-3'-phosphate
  modified_base 21: mod_base = OTHER; note = 2'-deoxy-2'-fluorouridine-3'-phosphate ((2S,4R)-1-[29-[[2-(acetylamino)-2-deoxy-beta-D-galactopyra nosyl]oxy]-14,14-bis[[3-[[3-[[5-[[2-(acetylamino)-2-deoxy-b eta-D-galactopyranosyl]oxy]-1-oxopentyl]amino]propyl]amino] -3-oxopropoxy]methyl]-1,12,19,25-tetraoxo-16-oxa-13,20,24-t riazanonacos-1-yl]-4-hydroxy-2-pyrrolidinyl)methyl ester
ctgccagaaagagaagtgctt

SEQ ID NO: 503 - RNA, 21 nt, synthetic construct
  source 1..21: mol_type = other RNA
  modified_base 1: mod_base = OTHER; note = 2'-deoxy-2'-fluorocytidine-3'-phosphorothioate
  modified_base 2: mod_base = OTHER; note = 2'-O-methyladenosine-3'-phosphorothioate
  modified_base 3: mod_base = OTHER; note = 2'-deoxy-2'-fluoroguanosine-3'-phosphate
  modified_base 4: mod_base = OTHER; note = 2'-O-methyladenosine-3'-phosphate
  modified_base 5: mod_base = OTHER; note = 2'-deoxy-2'-fluoroadenosine-3'-phosphate
  modified_base 6: mod_base = OTHER; note = 2'-O-methyladenosine-3'-phosphate
  modified_base 7: mod_base = OTHER; note = 2'-deoxy-2'-fluoroguanosine-3'-phosphate
  modified_base 8: mod_base = OTHER; note = 2'-O-methyladenosine-3'-phosphate
  modified_base 9: mod_base = OTHER; note = 2'-deoxy-2'-fluoroguanosine-3'-phosphate
  modified_base 10: mod_base = OTHER; note = 2'-deoxy-2'-fluoroadenosine-3'-phosphate
  modified_base 11: mod_base = OTHER; note = 2'-deoxy-2'-fluoroadenosine-3'-phosphate
  modified_base 12: mod_base = OTHER; note = 2'-O-methylguanosine-3'-phosphate
  modified_base 13: mod_base = OTHER; note = 2'-deoxy-2'-fluorouridine-3'-phosphate
  modified_base 14: mod_base = OTHER; note = 2'-O-methylguanosine-3'-phosphate
  modified_base 15: mod_base = OTHER; note = 2'-deoxy-2'-fluorocytidine-3'-phosphate
  modified_base 16: mod_base = OTHER; note = 2'-O-methyluridine-3'-phosphate
  modified_base 17: mod_base = OTHER; note = 2'-deoxy-2'-fluorouridine-3'-phosphate
  modified_base 18: mod_base = OTHER; note = 2'-O-methyluridine-3'-phosphate
  modified_base 19: mod_base = OTHER; note = 2'-deoxy-2'-fluoroguanosine-3'-phosphate
  modified_base 20: mod_base = OTHER; note = 2'-O-methyladenosine-3'-phosphate
  modified_base 21: mod_base = OTHER; note = 2'-deoxy-2'-fluoroadenosine-3'-phosphate ((2S,4R)-1-[29-[[2-(acetylamino)-2-deoxy-beta-D-galactopyra nosyl]oxy]-14,14-bis[[3-[[3-[[5-[[2-(acetylamino)-2-deoxy-b eta-D-galactopyranosyl]oxy]-1-oxopentyl]amino]propyl]amino] -3-oxopropoxy]methyl]-1,12,19,25-tetraoxo-16-oxa-13,20,24-t riazanonacos-1-yl]-4-hydroxy-2-pyrrolidinyl)methyl ester
cagaaagagaagtgctttgaa

SEQ ID NO: 504 - RNA, 21 nt, synthetic construct
  source 1..21: mol_type = other RNA
  modified_base 1: mod_base = OTHER; note = 2'-deoxy-2'-fluoroadenosine-3'-phosphorothioate
  modified_base 2: mod_base = OTHER; note = 2'-O-methylguanosine-3'-phosphorothioate
  modified_base 3: mod_base = OTHER; note = 2'-deoxy-2'-fluoroadenosine-3'-phosphate
  modified_base 4: mod_base = OTHER; note = 2'-O-methyladenosine-3'-phosphate
  modified_base 5: mod_base = OTHER; note = 2'-deoxy-2'-fluoroadenosine-3'-phosphate
  modified_base 6: mod_base = OTHER; note = 2'-O-methylguanosine-3'-phosphate
  modified_base 7: mod_base = OTHER; note = 2'-deoxy-2'-fluoroadenosine-3'-phosphate
  modified_base 8: mod_base = OTHER; note = 2'-O-methylguanosine-3'-phosphate
  modified_base 9: mod_base = OTHER; note = 2'-deoxy-2'-fluoroadenosine-3'-phosphate
  modified_base 10: mod_base = OTHER; note = 2'-deoxy-2'-fluoroadenosine-3'-phosphate
  modified_base 11: mod_base = OTHER; note = 2'-deoxy-2'-fluoroguanosine-3'-phosphate
  modified_base 12: mod_base = OTHER; note = 2'-O-methyluridine-3'-phosphate
  modified_base 13: mod_base = OTHER; note = 2'-deoxy-2'-fluoroguanosine-3'-phosphate
  modified_base 14: mod_base = OTHER; note = 2'-O-methylcytidine-3'-phosphate
  modified_base 15: mod_base = OTHER; note = 2'-deoxy-2'-fluorouridine-3'-phosphate
  modified_base 16: mod_base = OTHER; note = 2'-O-methyluridine-3'-phosphate
  modified_base 17: mod_base = OTHER; note = 2'-deoxy-2'-fluorouridine-3'-phosphate
  modified_base 18: mod_base = OTHER; note = 2'-O-methylguanosine-3'-phosphate
  modified_base 19: mod_base = OTHER; note = 2'-deoxy-2'-fluoroadenosine-3'-phosphate
  modified_base 20: mod_base = OTHER; note = 2'-O-methylguanosine-3'-phosphate
  modified_base 21: mod_base = OTHER; note = 2'-deoxy-2'-fluoroadenosine-3'-phosphate ((2S,4R)-1-[29-[[2-(acetylamino)-2-deoxy-beta-D-galactopyra nosyl]oxy]-14,14-bis[[3-[[3-[[5-[[2-(acetylamino)-2-deoxy-b eta-D-galactopyranosyl]oxy]-1-oxopentyl]amino]propyl]amino] -3-oxopropoxy]methyl]-1,12,19,25-tetraoxo-16-oxa-13,20,24-t riazanonacos-1-yl]-4-hydroxy-2-pyrrolidinyl)methyl ester
agaaagagaagtgctttgaga

SEQ ID NO: 505 - RNA, 21 nt, synthetic construct
  source 1..21: mol_type = other RNA
  modified_base 1: mod_base = OTHER; note = 2'-deoxy-2'-fluoroadenosine-3'-phosphorothioate
  modified_base 2: mod_base = OTHER; note = 2'-O-methylguanosine-3'-phosphorothioate
  modified_base 3: mod_base = OTHER; note = 2'-deoxy-2'-fluorouridine-3'-phosphate
  modified_base 4: mod_base = OTHER; note = 2'-O-methylguanosine-3'-phosphate
  modified_base 5: mod_base = OTHER; note = 2'-deoxy-2'-fluorocytidine-3'-phosphate
  modified_base 6: mod_base = OTHER; note = 2'-O-methyluridine-3'-phosphate
  modified_base 7: mod_base = OTHER; note = 2'-deoxy-2'-fluorouridine-3'-phosphate
  modified_base 8: mod_base = OTHER; note = 2'-O-methyluridine-3'-phosphate
  modified_base 9: mod_base = OTHER; note = 2'-deoxy-2'-fluoroguanosine-3'-phosphate
  modified_base 10: mod_base = OTHER; note = 2'-deoxy-2'-fluoroadenosine-3'-phosphate
  modified_base 11: mod_base = OTHER; note = 2'-deoxy-2'-fluoroguanosine-3'-phosphate
  modified_base 12: mod_base = OTHER; note = 2'-O-methylcytidine-3'-phosphate
  modified_base 13: mod_base = OTHER; note = 2'-deoxy-2'-fluorocytidine-3'-phosphate
  modified_base 14: mod_base = OTHER; note = 2'-O-methyluridine-3'-phosphate
  modified_base 15: mod_base = OTHER; note = 2'-deoxy-2'-fluorocytidine-3'-phosphate
  modified_base 16: mod_base = OTHER; note = 2'-O-methyladenosine-3'-phosphate
  modified_base 17: mod_base = OTHER; note = 2'-deoxy-2'-fluoroguanosine-3'-phosphate
  modified_base 18: mod_base = OTHER; note = 2'-O-methylcytidine-3'-phosphate
  modified_base 19: mod_base = OTHER; note = 2'-deoxy-2'-fluorouridine-3'-phosphate
  modified_base 20: mod_base = OTHER; note = 2'-O-methyluridine-3'-phosphate
  modified_base 21: mod_base = OTHER; note = 2'-deoxy-2'-fluoroadenosine-3'-phosphate ((2S,4R)-1-[29-[[2-(acetylamino)-2-deoxy-beta-D-galactopyra nosyl]oxy]-14,14-bis[[3-[[3-[[5-[[2-(acetylamino)-2-deoxy-b eta-D-galactopyranosyl]oxy]-1-oxopentyl]amino]propyl]amino] -3-oxopropoxy]methyl]-1,12,19,25-tetraoxo-16-oxa-13,20,24-t riazanonacos-1-yl]-4-hydroxy-2-pyrrolidinyl)methyl ester
agtgctttgagcctcagctta

SEQ ID NO: 506 - RNA, 21 nt, synthetic construct
  source 1..21: mol_type = other RNA
  modified_base 1: mod_base = OTHER; note = 2'-deoxy-2'-fluorouridine-3'-phosphorothioate
  modified_base 2: mod_base = OTHER; note = 2'-O-methyluridine-3'-phosphorothioate
  modified_base 3: mod_base = OTHER; note = 2'-deoxy-2'-fluorocytidine-3'-phosphate
  modified_base 4: mod_base = OTHER; note = 2'-O-methylcytidine-3'-phosphate
  modified_base 5: mod_base = OTHER; note = 2'-deoxy-2'-fluoroadenosine-3'-phosphate
  modified_base 6: mod_base = OTHER; note = 2'-O-methylcytidine-3'-phosphate
  modified_base 7: mod_base = OTHER; note = 2'-deoxy-2'-fluoroadenosine-3'-phosphate
  modified_base 8: mod_base = OTHER; note = 2'-O-methyladenosine-3'-phosphate
  modified_base 9: mod_base = OTHER; note = 2'-deoxy-2'-fluoroguanosine-3'-phosphate
  modified_base 10: mod_base = OTHER; note = 2'-deoxy-2'-fluoroadenosine-3'-phosphate
  modified_base 11: mod_base = OTHER; note = 2'-deoxy-2'-fluoroadenosine-3'-phosphate
  modified_base 12: mod_base = OTHER; note = 2'-O-methyluridine-3'-phosphate
  modified_base 13: mod_base = OTHER; note = 2'-deoxy-2'-fluoroguanosine-3'-phosphate
  modified_base 14: mod_base = OTHER; note = 2'-O-methyladenosine-3'-phosphate
  modified_base 15: mod_base = OTHER; note = 2'-deoxy-2'-fluoroguanosine-3'-phosphate
  modified_base 16: mod_base = OTHER; note = 2'-O-methyladenosine-3'-phosphate
  modified_base 17: mod_base = OTHER; note = 2'-deoxy-2'-fluorouridine-3'-phosphate
  modified_base 18: mod_base = OTHER; note = 2'-O-methyladenosine-3'-phosphate
  modified_base 19: mod_base = OTHER; note = 2'-deoxy-2'-fluorouridine-3'-phosphate
  modified_base 20: mod_base = OTHER; note = 2'-O-methylguanosine-3'-phosphate
  modified_base 21: mod_base = OTHER; note = 2'-deoxy-2'-fluoroadenosine-3'-phosphate ((2S,4R)-1-[29-[[2-(acetylamino)-2-deoxy-beta-D-galactopyra nosyl]oxy]-14,14-bis[[3-[[3-[[5-[[2-(acetylamino)-2-deoxy-b eta-D-galactopyranosyl]oxy]-1-oxopentyl]amino]propyl]amino] -3-oxopropoxy]methyl]-1,12,19,25-tetraoxo-16-oxa-13,20,24-t riazanonacos-1-yl]-4-hydroxy-2-pyrrolidinyl)methyl ester
ttccacaagaatgagatatga

SEQ ID NO: 507 - RNA, 21 nt, synthetic construct
  source 1..21: mol_type = other RNA
  modified_base 1: mod_base = OTHER; note = 2'-deoxy-2'-fluorouridine-3'-phosphorothioate
  modified_base 2: mod_base = OTHER; note = 2'-O-methylcytidine-3'-phosphorothioate
  modified_base 3: mod_base = OTHER; note = 2'-deoxy-2'-fluorocytidine-3'-phosphate
  modified_base 4: mod_base = OTHER; note = 2'-O-methyladenosine-3'-phosphate
  modified_base 5: mod_base = OTHER; note = 2'-deoxy-2'-fluorocytidine-3'-phosphate
  modified_base 6: mod_base = OTHER; note = 2'-O-methyladenosine-3'-phosphate
  modified_base 7: mod_base = OTHER; note = 2'-deoxy-2'-fluoroadenosine-3'-phosphate
  modified_base 8: mod_base = OTHER; note = 2'-O-methylguanosine-3'-phosphate
  modified_base 9: mod_base = OTHER; note = 2'-deoxy-2'-fluoroadenosine-3'-phosphate
  modified_base 10: mod_base = OTHER; note = 2'-deoxy-2'-fluoroadenosine-3'-phosphate
  modified_base 11: mod_base = OTHER; note = 2'-deoxy-2'-fluorouridine-3'-phosphate
  modified_base 12: mod_base = OTHER; note = 2'-O-methylguanosine-3'-phosphate
  modified_base 13: mod_base = OTHER; note = 2'-deoxy-2'-fluoroadenosine-3'-phosphate
  modified_base 14: mod_base = OTHER; note = 2'-O-methylguanosine-3'-phosphate
  modified_base 15: mod_base = OTHER; note = 2'-deoxy-2'-fluoroadenosine-3'-phosphate
  modified_base 16: mod_base = OTHER; note = 2'-O-methyluridine-3'-phosphate
  modified_base 17: mod_base = OTHER; note = 2'-deoxy-2'-fluoroadenosine-3'-phosphate
  modified_base 18: mod_base = OTHER; note = 2'-O-methyluridine-3'-phosphate
  modified_base 19: mod_base = OTHER; note = 2'-deoxy-2'-fluoroguanosine-3'-phosphate
  modified_base 20: mod_base = OTHER; note = 2'-O-methylguanosine-3'-phosphate
  modified_base 21: mod_base = OTHER; note = 2'-deoxy-2'-fluorouridine-3'-phosphate ((2S,4R)-1-[29-[[2-(acetylamino)-2-deoxy-beta-D-galactopyra nosyl]oxy]-14,14-bis[[3-[[3-[[5-[[2-(acetylamino)-2-deoxy-b eta-D-galactopyranosyl]oxy]-1-oxopentyl]amino]propyl]amino] -3-oxopropoxy]methyl]-1,12,19,25-tetraoxo-16-oxa-13,20,24-t riazanonacos-1-yl]-4-hydroxy-2-pyrrolidinyl)methyl ester
tccacaagaatgagatatggt

SEQ ID NO: 508 - RNA, 21 nt, synthetic construct
  source 1..21: mol_type = other RNA
  modified_base 1: mod_base = OTHER; note = 2'-deoxy-2'-fluorocytidine-3'-phosphorothioate
  modified_base 2: mod_base = OTHER; note = 2'-O-methylcytidine-3'-phosphorothioate
  modified_base 3: mod_base = OTHER; note = 2'-deoxy-2'-fluoroadenosine-3'-phosphate
  modified_base 4: mod_base = OTHER; note = 2'-O-methylcytidine-3'-phosphate
  modified_base 5: mod_base = OTHER; note = 2'-deoxy-2'-fluoroadenosine-3'-phosphate
  modified_base 6: mod_base = OTHER; note = 2'-O-methyladenosine-3'-phosphate
  modified_base 7: mod_base = OTHER; note = 2'-deoxy-2'-fluoroguanosine-3'-phosphate
  modified_base 8: mod_base = OTHER; note = 2'-O-methyladenosine-3'-phosphate
  modified_base 9: mod_base = OTHER; note = 2'-deoxy-2'-fluoroadenosine-3'-phosphate
  modified_base 10: mod_base = OTHER; note = 2'-deoxy-2'-fluorouridine-3'-phosphate
  modified_base 11: mod_base = OTHER; note = 2'-deoxy-2'-fluoroguanosine-3'-phosphate
  modified_base 12: mod_base = OTHER; note = 2'-O-methyladenosine-3'-phosphate
  modified_base 13: mod_base = OTHER; note = 2'-deoxy-2'-fluoroguanosine-3'-phosphate
  modified_base 14: mod_base = OTHER; note = 2'-O-methyladenosine-3'-phosphate
  modified_base 15: mod_base = OTHER; note = 2'-deoxy-2'-fluorouridine-3'-phosphate
  modified_base 16: mod_base = OTHER; note = 2'-O-methyladenosine-3'-phosphate
  modified_base 17: mod_base = OTHER; note = 2'-deoxy-2'-fluorouridine-3'-phosphate
  modified_base 18: mod_base = OTHER; note = 2'-O-methylguanosine-3'-phosphate
  modified_base 19: mod_base = OTHER; note = 2'-deoxy-2'-fluoroguanosine-3'-phosphate
  modified_base 20: mod_base = OTHER; note = 2'-O-methyluridine-3'-phosphate
  modified_base 21: mod_base = OTHER; note = 2'-deoxy-2'-fluoroadenosine-3'-phosphate ((2S,4R)-1-[29-[[2-(acetylamino)-2-deoxy-beta-D-galactopyra nosyl]oxy]-14,14-bis[[3-[[3-[[5-[[2-(acetylamino)-2-deoxy-b eta-D-galactopyranosyl]oxy]-1-oxopentyl]amino]propyl]amino] -3-oxopropoxy]methyl]-1,12,19,25-tetraoxo-16-oxa-13,20,24-t riazanonacos-1-yl]-4-hydroxy-2-pyrrolidinyl)methyl ester
ccacaagaatgagatatggta

SEQ ID NO: 509 - RNA, 21 nt, synthetic construct
  source 1..21: mol_type = other RNA
  modified_base 1: mod_base = OTHER; note = 2'-deoxy-2'-fluoroadenosine-3'-phosphorothioate
  modified_base 2: mod_base = OTHER; note = 2'-O-methyladenosine-3'-phosphorothioate
  modified_base 3: mod_base = OTHER; note = 2'-deoxy-2'-fluoroguanosine-3'-phosphate
  modified_base 4: mod_base = OTHER; note = 2'-O-methyladenosine-3'-phosphate
  modified_base 5: mod_base = OTHER; note = 2'-deoxy-2'-fluoroadenosine-3'-phosphate
  modified_base 6: mod_base = OTHER; note = 2'-O-methyluridine-3'-phosphate
  modified_base 7: mod_base = OTHER; note = 2'-deoxy-2'-fluoroguanosine-3'-phosphate
  modified_base 8: mod_base = OTHER; note = 2'-O-methyladenosine-3'-phosphate
  modified_base 9: mod_base = OTHER; note = 2'-deoxy-2'-fluoroguanosine-3'-phosphate
  modified_base 10: mod_base = OTHER; note = 2'-deoxy-2'-fluoroadenosine-3'-phosphate
  modified_base 11: mod_base = OTHER; note = 2'-deoxy-2'-fluorouridine-3'-phosphate
  modified_base 12: mod_base = OTHER; note = 2'-O-methyladenosine-3'-phosphate
  modified_base 13: mod_base = OTHER; note = 2'-deoxy-2'-fluorouridine-3'-phosphate
  modified_base 14: mod_base = OTHER; note = 2'-O-methylguanosine-3'-phosphate
  modified_base 15: mod_base = OTHER; note = 2'-deoxy-2'-fluoroguanosine-3'-phosphate
  modified_base 16: mod_base = OTHER; note = 2'-O-methyluridine-3'-phosphate
  modified_base 17: mod_base = OTHER; note = 2'-deoxy-2'-fluoroadenosine-3'-phosphate
  modified_base 18: mod_base = OTHER; note = 2'-O-methyluridine-3'-phosphate
  modified_base 19: mod_base = OTHER; note = 2'-deoxy-2'-fluoroadenosine-3'-phosphate
  modified_base 20: mod_base = OTHER; note = 2'-O-methylguanosine-3'-phosphate
  modified_base 21: mod_base = OTHER; note = 2'-deoxy-2'-fluoroadenosine-3'-phosphate ((2S,4R)-1-[29-[[2-(acetylamino)-2-deoxy-beta-D-galactopyra nosyl]oxy]-14,14-bis[[3-[[3-[[5-[[2-(acetylamino)-2-deoxy-b eta-D-galactopyranosyl]oxy]-1-oxopentyl]amino]propyl]amino] -3-oxopropoxy]methyl]-1,12,19,25-tetraoxo-16-oxa-13,20,24-t riazanonacos-1-yl]-4-hydroxy-2-pyrrolidinyl)methyl ester
aagaatgagatatggtataga

SEQ ID NO: 510 - RNA, 21 nt, synthetic construct
  source 1..21: mol_type = other RNA
  modified_base 1: mod_base = OTHER; note = 2'-deoxy-2'-fluorouridine-3'-phosphorothioate
  modified_base 2: mod_base = OTHER; note = 2'-O-methylguanosine-3'-phosphorothioate
  modified_base 3: mod_base = OTHER; note = 2'-deoxy-2'-fluoroguanosine-3'-phosphate
  modified_base 4: mod_base = OTHER; note = 2'-O-methyluridine-3'-phosphate
  modified_base 5: mod_base = OTHER; note = 2'-deoxy-2'-fluoroadenosine-3'-phosphate
  modified_base 6: mod_base = OTHER; note = 2'-O-methyluridine-3'-phosphate
  modified_base 7: mod_base = OTHER; note = 2'-deoxy-2'-fluoroadenosine-3'-phosphate
  modified_base 8: mod_base = OTHER; note = 2'-O-methylguanosine-3'-phosphate
  modified_base 9: mod_base = OTHER; note = 2'-deoxy-2'-fluoroadenosine-3'-phosphate
  modified_base 10: mod_base = OTHER; note = 2'-deoxy-2'-fluoroadenosine-3'-phosphate
  modified_base 11: mod_base = OTHER; note = 2'-deoxy-2'-fluorocytidine-3'-phosphate
  modified_base 12: mod_base = OTHER; note = 2'-O-methyluridine-3'-phosphate
  modified_base 13: mod_base = OTHER; note = 2'-deoxy-2'-fluoroguanosine-3'-phosphate
  modified_base 14: mod_base = OTHER; note = 2'-O-methyladenosine-3'-phosphate
  modified_base 15: mod_base = OTHER; note = 2'-deoxy-2'-fluoroguanosine-3'-phosphate
  modified_base 16: mod_base = OTHER; note = 2'-O-methylcytidine-3'-phosphate
  modified_base 17: mod_base = OTHER; note = 2'-deoxy-2'-fluoroadenosine-3'-phosphate
  modified_base 18: mod_base = OTHER; note = 2'-O-methyladenosine-3'-phosphate
  modified_base 19: mod_base = OTHER; note = 2'-deoxy-2'-fluoroguanosine-3'-phosphate
  modified_base 20: mod_base = OTHER; note = 2'-O-methylcytidine-3'-phosphate
  modified_base 21: mod_base = OTHER; note = 2'-deoxy-2'-fluoroadenosine-3'-phosphate ((2S,4R)-1-[29-[[2-(acetylamino)-2-deoxy-beta-D-galactopyra nosyl]oxy]-14,14-bis[[3-[[3-[[5-[[2-(acetylamino)-2-deoxy-b eta-D-galactopyranosyl]oxy]-1-oxopentyl]amino]propyl]amino] -3-oxopropoxy]methyl]-1,12,19,25-tetraoxo-16-oxa-13,20,24-t riazanonacos-1-yl]-4-hydroxy-2-pyrrolidinyl)methyl ester
tggtatagaactgagcaagca

SEQ ID NO: 511 - RNA, 21 nt, synthetic construct
  source 1..21: mol_type = other RNA
  modified_base 1: mod_base = OTHER; note = 2'-deoxy-2'-fluoroguanosine-3'-phosphorothioate
  modified_base 2: mod_base = OTHER; note = 2'-O-methyluridine-3'-phosphorothioate
  modified_base 3: mod_base = OTHER; note = 2'-deoxy-2'-fluoroadenosine-3'-phosphate
  modified_base 4: mod_base = OTHER; note = 2'-O-methyluridine-3'-phosphate
  modified_base 5: mod_base = OTHER; note = 2'-deoxy-2'-fluoroadenosine-3'-phosphate
  modified_base 6: mod_base = OTHER; note = 2'-O-methylguanosine-3'-phosphate
  modified_base 7: mod_base = OTHER; note = 2'-deoxy-2'-fluoroadenosine-3'-phosphate
  modified_base 8: mod_base = OTHER; note = 2'-O-methyladenosine-3'-phosphate
  modified_base 9: mod_base = OTHER; note = 2'-deoxy-2'-fluorocytidine-3'-phosphate
  modified_base 10: mod_base = OTHER; note = 2'-deoxy-2'-fluorouridine-3'-phosphate
  modified_base 11: mod_base = OTHER; note = 2'-deoxy-2'-fluoroguanosine-3'-phosphate
  modified_base 12: mod_base = OTHER; note = 2'-O-methyladenosine-3'-phosphate
  modified_base 13: mod_base = OTHER; note = 2'-deoxy-2'-fluoroguanosine-3'-phosphate
  modified_base 14: mod_base = OTHER; note = 2'-O-methylcytidine-3'-phosphate
  modified_base 15: mod_base = OTHER; note = 2'-deoxy-2'-fluoroadenosine-3'-phosphate
  modified_base 16: mod_base = OTHER; note = 2'-O-methyladenosine-3'-phosphate
  modified_base 17: mod_base = OTHER; note = 2'-deoxy-2'-fluoroguanosine-3'-phosphate
  modified_base 18: mod_base = OTHER; note = 2'-O-methylcytidine-3'-phosphate
  modified_base 19: mod_base = OTHER; note = 2'-deoxy-2'-fluoroadenosine-3'-phosphate
  modified_base 20: mod_base = OTHER; note = 2'-O-methylguanosine-3'-phosphate
  modified_base 21: mod_base = OTHER; note = 2'-deoxy-2'-fluoroadenosine-3'-phosphate ((2S,4R)-1-[29-[[2-(acetylamino)-2-deoxy-beta-D-galactopyra nosyl]oxy]-14,14-bis[[3-[[3-[[5-[[2-(acetylamino)-2-deoxy-b eta-D-galactopyranosyl]oxy]-1-oxopentyl]amino]propyl]amino] -3-oxopropoxy]methyl]-1,12,19,25-tetraoxo-16-oxa-13,20,24-t riazanonacos-1-yl]-4-hydroxy-2-pyrrolidinyl)methyl ester
gtatagaactgagcaagcaga

SEQ ID NO: 512 - RNA, 21 nt, synthetic construct
  source 1..21: mol_type = other RNA
  modified_base 1: mod_base = OTHER; note = 2'-deoxy-2'-fluoroadenosine-3'-phosphorothioate
  modified_base 2: mod_base = OTHER; note = 2'-O-methyluridine-3'-phosphorothioate
  modified_base 3: mod_base = OTHER; note = 2'-deoxy-2'-fluoroadenosine-3'-phosphate
  modified_base 4: mod_base = OTHER; note = 2'-O-methylguanosine-3'-phosphate
  modified_base 5: mod_base = OTHER; note = 2'-deoxy-2'-fluoroadenosine-3'-phosphate
  modified_base 6: mod_base = OTHER; note = 2'-O-methyladenosine-3'-phosphate
  modified_base 7: mod_base = OTHER; note = 2'-deoxy-2'-fluorocytidine-3'-phosphate
  modified_base 8: mod_base = OTHER; note = 2'-O-methyluridine-3'-phosphate
  modified_base 9: mod_base = OTHER; note = 2'-deoxy-2'-fluoroguanosine-3'-phosphate
  modified_base 10: mod_base = OTHER; note = 2'-deoxy-2'-fluoroadenosine-3'-phosphate
  modified_base 11: mod_base = OTHER; note = 2'-deoxy-2'-fluoroguanosine-3'-phosphate
  modified_base 12: mod_base = OTHER; note = 2'-O-methylcytidine-3'-phosphate
  modified_base 13: mod_base = OTHER; note = 2'-deoxy-2'-fluoroadenosine-3'-phosphate
  modified_base 14: mod_base = OTHER; note = 2'-O-methyladenosine-3'-phosphate
  modified_base 15: mod_base = OTHER; note = 2'-deoxy-2'-fluoroguanosine-3'-phosphate
  modified_base 16: mod_base = OTHER; note = 2'-O-methylcytidine-3'-phosphate
  modified_base 17: mod_base = OTHER; note = 2'-deoxy-2'-fluoroadenosine-3'-phosphate
  modified_base 18: mod_base = OTHER; note = 2'-O-methylguanosine-3'-phosphate
  modified_base 19: mod_base = OTHER; note = 2'-deoxy-2'-fluorocytidine-3'-phosphate
  modified_base 20: mod_base = OTHER; note = 2'-O-methyluridine-3'-phosphate
  modified_base 21: mod_base = OTHER; note = 2'-deoxy-2'-fluoroadenosine-3'-phosphate ((2S,4R)-1-[29-[[2-(acetylamino)-2-deoxy-beta-D-galactopyra nosyl]oxy]-14,14-bis[[3-[[3-[[5-[[2-(acetylamino)-2-deoxy-b eta-D-galactopyranosyl]oxy]-1-oxopentyl]amino]propyl]amino] -3-oxopropoxy]methyl]-1,12,19,25-tetraoxo-16-oxa-13,20,24-t riazanonacos-1-yl]-4-hydroxy-2-pyrrolidinyl)methyl ester
atagaactgagcaagcagcta

SEQ ID NO: 513 - RNA, 21 nt, synthetic construct
  source 1..21: mol_type = other RNA
  modified_base 1: mod_base = OTHER; note = 2'-deoxy-2'-fluorocytidine-3'-phosphorothioate
  modified_base 2: mod_base = OTHER; note = 2'-O-methylcytidine-3'-phosphorothioate
  modified_base 3: mod_base = OTHER; note = 2'-deoxy-2'-fluoroadenosine-3'-phosphate
  modified_base 4: mod_base = OTHER; note = 2'-O-methylguanosine-3'-phosphate
  modified_base 5: mod_base = OTHER; note = 2'-deoxy-2'-fluoroadenosine-3'-phosphate
  modified_base 6: mod_base = OTHER; note = 2'-O-methyluridine-3'-phosphate
  modified_base 7: mod_base = OTHER; note = 2'-deoxy-2'-fluoroguanosine-3'-phosphate
  modified_base 8: mod_base = OTHER; note = 2'-O-methylcytidine-3'-phosphate
  modified_base 9: mod_base = OTHER; note = 2'-deoxy-2'-fluorocytidine-3'-phosphate
  modified_base 10: mod_base = OTHER; note = 2'-deoxy-2'-fluoroadenosine-3'-phosphate
  modified_base 11: mod_base = OTHER; note = 2'-deoxy-2'-fluoroguanosine-3'-phosphate
  modified_base 12: mod_base = OTHER; note = 2'-O-methyluridine-3'-phosphate
  modified_base 13: mod_base = OTHER; note = 2'-deoxy-2'-fluoroguanosine-3'-phosphate
  modified_base 14: mod_base = OTHER; note = 2'-O-methylcytidine-3'-phosphate
  modified_base 15: mod_base = OTHER; note = 2'-deoxy-2'-fluoroadenosine-3'-phosphate
  modified_base 16: mod_base = OTHER; note = 2'-O-methyladenosine-3'-phosphate
  modified_base 17: mod_base = OTHER; note = 2'-deoxy-2'-fluoroguanosine-3'-phosphate
  modified_base 18: mod_base = OTHER; note = 2'-O-methylguanosine-3'-phosphate
  modified_base 19: mod_base = OTHER; note = 2'-deoxy-2'-fluoroguanosine-3'-phosphate
  modified_base 20: mod_base = OTHER; note = 2'-O-methyluridine-3'-phosphate
  modified_base 21: mod_base = OTHER; note = 2'-deoxy-2'-fluoroadenosine-3'-phosphate ((2S,4R)-1-[29-[[2-(acetylamino)-2-deoxy-beta-D-galactopyra nosyl]oxy]-14,14-bis[[3-[[3-[[5-[[2-(acetylamino)-2-deoxy-b eta-D-galactopyranosyl]oxy]-1-oxopentyl]amino]propyl]amino] -3-oxopropoxy]methyl]-1,12,19,25-tetraoxo-16-oxa-13,20,24-t riazanonacos-1-yl]-4-hydroxy-2-pyrrolidinyl)methyl ester
ccagatgccagtgcaagggta

SEQ ID NO: 514 - RNA, 21 nt, synthetic construct
  source 1..21: mol_type = other RNA
  modified_base 1: mod_base = OTHER; note = 2'-deoxy-2'-fluoroguanosine-3'-phosphorothioate
  modified_base 2: mod_base = OTHER; note = 2'-O-methylcytidine-3'-phosphorothioate
  modified_base 3: mod_base = OTHER; note = 2'-deoxy-2'-fluorocytidine-3'-phosphate
  modified_base 4: mod_base = OTHER; note = 2'-O-methyladenosine-3'-phosphate
  modified_base 5: mod_base = OTHER; note = 2'-deoxy-2'-fluoroguanosine-3'-phosphate
  modified_base 6: mod_base = OTHER; note = 2'-O-methyluridine-3'-phosphate
  modified_base 7: mod_base = OTHER; note = 2'-deoxy-2'-fluoroguanosine-3'-phosphate
  modified_base 8: mod_base = OTHER; note = 2'-O-methylcytidine-3'-phosphate
  modified_base 9: mod_base = OTHER; note = 2'-deoxy-2'-fluoroadenosine-3'-phosphate
  modified_base 10: mod_base = OTHER; note = 2'-deoxy-2'-fluoroadenosine-3'-phosphate
  modified_base 11: mod_base = OTHER; note = 2'-deoxy-2'-fluoroguanosine-3'-phosphate
  modified_base 12: mod_base = OTHER; note = 2'-O-methylguanosine-3'-phosphate
  modified_base 13: mod_base = OTHER; note = 2'-deoxy-2'-fluoroguanosine-3'-phosphate
  modified_base 14: mod_base = OTHER; note = 2'-O-methyluridine-3'-phosphate
  modified_base 15: mod_base = OTHER; note = 2'-deoxy-2'-fluorocytidine-3'-phosphate
  modified_base 16: mod_base = OTHER; note = 2'-O-methylcytidine-3'-phosphate
  modified_base 17: mod_base = OTHER; note = 2'-deoxy-2'-fluorouridine-3'-phosphate
  modified_base 18: mod_base = OTHER; note = 2'-O-methylguanosine-3'-phosphate
  modified_base 19: mod_base = OTHER; note = 2'-deoxy-2'-fluoroadenosine-3'-phosphate
  modified_base 20: mod_base = OTHER; note = 2'-O-methyluridine-3'-phosphate
  modified_base 21: mod_base = OTHER; note = 2'-deoxy-2'-fluoroadenosine-3'-phosphate ((2S,4R)-1-[29-[[2-(acetylamino)-2-deoxy-beta-D-galactopyra nosyl]oxy]-14,14-bis[[3-[[3-[[5-[[2-(acetylamino)-2-deoxy-b eta-D-galactopyranosyl]oxy]-1-oxopentyl]amino]propyl]amino] -3-oxopropoxy]methyl]-1,12,19,25-tetraoxo-16-oxa-13,20,24-t riazanonacos-1-yl]-4-hydroxy-2-pyrrolidinyl)methyl ester
gccagtgcaagggtcctgata

SEQ ID NO: 515 - RNA, 21 nt, synthetic construct
  source 1..21: mol_type = other RNA
  modified_base 1: mod_base = OTHER; note = 2'-deoxy-2'-fluorocytidine-3'-phosphorothioate
  modified_base 2: mod_base = OTHER; note = 2'-O-methyladenosine-3'-phosphorothioate
  modified_base 3: mod_base = OTHER; note = 2'-deoxy-2'-fluoroguanosine-3'-phosphate
  modified_base 4: mod_base = OTHER; note = 2'-O-methyluridine-3'-phosphate
  modified_base 5: mod_base = OTHER; note = 2'-deoxy-2'-fluoroguanosine-3'-phosphate
  modified_base 6: mod_base = OTHER; note = 2'-O-methylcytidine-3'-phosphate
  modified_base 7: mod_base = OTHER; note = 2'-deoxy-2'-fluoroadenosine-3'-phosphate
  modified_base 8: mod_base = OTHER; note = 2'-O-methyladenosine-3'-phosphate
  modified_base 9: mod_base = OTHER; note = 2'-deoxy-2'-fluoroguanosine-3'-phosphate
  modified_base 10: mod_base = OTHER; note = 2'-deoxy-2'-fluoroguanosine-3'-phosphate
  modified_base 11: mod_base = OTHER; note = 2'-deoxy-2'-fluoroguanosine-3'-phosphate
  modified_base 12: mod_base = OTHER; note = 2'-O-methyluridine-3'-phosphate
  modified_base 13: mod_base = OTHER; note = 2'-deoxy-2'-fluorocytidine-3'-phosphate
  modified_base 14: mod_base = OTHER; note = 2'-O-methylcytidine-3'-phosphate
  modified_base 15: mod_base = OTHER; note = 2'-deoxy-2'-fluorouridine-3'-phosphate
  modified_base 16: mod_base = OTHER; note = 2'-O-methylguanosine-3'-phosphate
  modified_base 17: mod_base = OTHER; note = 2'-deoxy-2'-fluoroadenosine-3'-phosphate
  modified_base 18: mod_base = OTHER; note = 2'-O-methyluridine-3'-phosphate
  modified_base 19: mod_base = OTHER; note = 2'-deoxy-2'-fluoroguanosine-3'-phosphate
  modified_base 20: mod_base = OTHER; note = 2'-O-methylcytidine-3'-phosphate
  modified_base 21: mod_base = OTHER; note = 2'-deoxy-2'-fluoroadenosine-3'-phosphate ((2S,4R)-1-[29-[[2-(acetylamino)-2-deoxy-beta-D-galactopyra nosyl]oxy]-14,14-bis[[3-[[3-[[5-[[2-(acetylamino)-2-deoxy-b eta-D-galactopyranosyl]oxy]-1-oxopentyl]amino]propyl]amino] -3-oxopropoxy]methyl]-1,12,19,25-tetraoxo-16-oxa-13,20,24-t riazanonacos-1-yl]-4-hydroxy-2-pyrrolidinyl)methyl ester
cagtgcaagggtcctgatgca

SEQ ID NO: 516 - RNA, 21 nt, synthetic construct
  source 1..21: mol_type = other RNA
  modified_base 1: mod_base = OTHER; note = 2'-deoxy-2'-fluoroadenosine-3'-phosphorothioate
  modified_base 2: mod_base = OTHER; note = 2'-O-methylcytidine-3'-phosphorothioate
  modified_base 3: mod_base = OTHER; note = 2'-deoxy-2'-fluorocytidine-3'-phosphate
  modified_base 4: mod_base = OTHER; note = 2'-O-methyladenosine-3'-phosphate
  modified_base 5: mod_base = OTHER; note = 2'-deoxy-2'-fluoroadenosine-3'-phosphate
  modified_base 6: mod_base = OTHER; note = 2'-O-methylguanosine-3'-phosphate
  modified_base 7: mod_base = OTHER; note = 2'-deoxy-2'-fluoroguanosine-3'-phosphate
  modified_base 8: mod_base = OTHER; note = 2'-O-methylcytidine-3'-phosphate
  modified_base 9: mod_base = OTHER; note = 2'-deoxy-2'-fluoroadenosine-3'-phosphate
  modified_base 10: mod_base = OTHER; note = 2'-deoxy-2'-fluoroadenosine-3'-phosphate
  modified_base 11: mod_base = OTHER; note = 2'-deoxy-2'-fluoroguanosine-3'-phosphate
  modified_base 12: mod_base = OTHER; note = 2'-O-methylcytidine-3'-phosphate
  modified_base 13: mod_base = OTHER; note = 2'-deoxy-2'-fluorouridine-3'-phosphate
  modified_base 14: mod_base = OTHER; note = 2'-O-methylguanosine-3'-phosphate
  modified_base 15: mod_base = OTHER; note = 2'-deoxy-2'-fluorocytidine-3'-phosphate
  modified_base 16: mod_base = OTHER; note = 2'-O-methyluridine-3'-phosphate
  modified_base 17: mod_base = OTHER; note = 2'-deoxy-2'-fluoroadenosine-3'-phosphate
  modified_base 18: mod_base = OTHER; note = 2'-O-methyluridine-3'-phosphate
  modified_base 19: mod_base = OTHER; note = 2'-deoxy-2'-fluoroguanosine-3'-phosphate
  modified_base 20: mod_base = OTHER; note = 2'-O-methyladenosine-3'-phosphate
  modified_base 21: mod_base = OTHER; note = 2'-deoxy-2'-fluorouridine-3'-phosphate ((2S,4R)-1-[29-[[2-(acetylamino)-2-deoxy-beta-D-galactopyra nosyl]oxy]-14,14-bis[[3-[[3-[[5-[[2-(acetylamino)-2-deoxy-b eta-D-galactopyranosyl]oxy]-1-oxopentyl]amino]propyl]amino] -3-oxopropoxy]methyl]-1,12,19,25-tetraoxo-16-oxa-13,20,24-t riazanonacos-1-yl]-4-hydroxy-2-pyrrolidinyl)methyl ester
accaaggcaagctgctatgat

SEQ ID NO: 517 - RNA, 21 nt, synthetic construct
  source 1..21: mol_type = other RNA
  modified_base 1: mod_base = OTHER; note = 2'-deoxy-2'-fluorocytidine-3'-phosphorothioate
  modified_base 2: mod_base = OTHER; note = 2'-O-methylcytidine-3'-phosphorothioate
  modified_base 3: mod_base = OTHER; note = 2'-deoxy-2'-fluoroadenosine-3'-phosphate
  modified_base 4: mod_base = OTHER; note = 2'-O-methyladenosine-3'-phosphate
  modified_base 5: mod_base = OTHER; note = 2'-deoxy-2'-fluoroguanosine-3'-phosphate
  modified_base 6: mod_base = OTHER; note = 2'-O-methylguanosine-3'-phosphate
  modified_base 7: mod_base = OTHER; note = 2'-deoxy-2'-fluorocytidine-3'-phosphate
  modified_base 8: mod_base = OTHER; note = 2'-O-methyladenosine-3'-phosphate
  modified_base 9: mod_base = OTHER; note = 2'-deoxy-2'-fluoroadenosine-3'-phosphate
  modified_base 10: mod_base = OTHER; note = 2'-deoxy-2'-fluoroguanosine-3'-phosphate
  modified_base 11: mod_base = OTHER; note = 2'-deoxy-2'-fluorocytidine-3'-phosphate
  modified_base 12: mod_base = OTHER; note = 2'-O-methyluridine-3'-phosphate
  modified_base 13: mod_base = OTHER; note = 2'-deoxy-2'-fluoroguanosine-3'-phosphate
  modified_base 14: mod_base = OTHER; note = 2'-O-methylcytidine-3'-phosphate
  modified_base 15: mod_base = OTHER; note = 2'-deoxy-2'-fluorouridine-3'-phosphate
  modified_base 16: mod_base = OTHER; note = 2'-O-methyladenosine-3'-phosphate
  modified_base 17: mod_base = OTHER; note = 2'-deoxy-2'-fluorouridine-3'-phosphate
  modified_base 18: mod_base = OTHER; note = 2'-O-methylguanosine-3'-phosphate
  modified_base 19: mod_base = OTHER; note = 2'-deoxy-2'-fluoroadenosine-3'-phosphate
  modified_base 20: mod_base = OTHER; note = 2'-O-methyluridine-3'-phosphate
  modified_base 21: mod_base = OTHER; note = 2'-deoxy-2'-fluoroadenosine-3'-phosphate ((2S,4R)-1-[29-[[2-(acetylamino)-2-deoxy-beta-D-galactopyra nosyl]oxy]-14,14-bis[[3-[[3-[[5-[[2-(acetylamino)-2-deoxy-b eta-D-galactopyranosyl]oxy]-1-oxopentyl]amino]propyl]amino] -3-oxopropoxy]methyl]-1,12,19,25-tetraoxo-16-oxa-13,20,24-t riazanonacos-1-yl]-4-hydroxy-2-pyrrolidinyl)methyl ester
ccaaggcaagctgctatgata

SEQ ID NO: 518 - RNA, 21 nt, synthetic construct
  source 1..21: mol_type = other RNA
  modified_base 1: mod_base = OTHER; note = 2'-deoxy-2'-fluoroadenosine-3'-phosphorothioate
  modified_base 2: mod_base = OTHER; note = 2'-O-methylguanosine-3'-phosphorothioate
  modified_base 3: mod_base = OTHER; note = 2'-deoxy-2'-fluoroguanosine-3'-phosphate
  modified_base 4: mod_base = OTHER; note = 2'-O-methylcytidine-3'-phosphate
  modified_base 5: mod_base = OTHER; note = 2'-deoxy-2'-fluorouridine-3'-phosphate
  modified_base 6: mod_base = OTHER; note = 2'-O-methyluridine-3'-phosphate
  modified_base 7: mod_base = OTHER; note = 2'-deoxy-2'-fluorocytidine-3'-phosphate
  modified_base 8: mod_base = OTHER; note = 2'-O-methyladenosine-3'-phosphate
  modified_base 9: mod_base = OTHER; note = 2'-deoxy-2'-fluorouridine-3'-phosphate
  modified_base 10: mod_base = OTHER; note = 2'-deoxy-2'-fluoroguanosine-3'-phosphate
  modified_base 11: mod_base = OTHER; note = 2'-deoxy-2'-fluorouridine-3'-phosphate
  modified_base 12: mod_base = OTHER; note = 2'-O-methylcytidine-3'-phosphate
  modified_base 13: mod_base = OTHER; note = 2'-deoxy-2'-fluorocytidine-3'-phosphate
  modified_base 14: mod_base = OTHER; note = 2'-O-methylcytidine-3'-phosphate
  modified_base 15: mod_base = OTHER; note = 2'-deoxy-2'-fluoroadenosine-3'-phosphate
  modified_base 16: mod_base = OTHER; note = 2'-O-methylcytidine-3'-phosphate
  modified_base 17: mod_base = OTHER; note = 2'-deoxy-2'-fluorouridine-3'-phosphate
  modified_base 18: mod_base = OTHER; note = 2'-O-methylcytidine-3'-phosphate
  modified_base 19: mod_base = OTHER; note = 2'-deoxy-2'-fluoroadenosine-3'-phosphate
  modified_base 20: mod_base = OTHER; note = 2'-O-methyluridine-3'-phosphate
  modified_base 21: mod_base = OTHER; note = 2'-deoxy-2'-fluoroadenosine-3'-phosphate ((2S,4R)-1-[29-[[2-(acetylamino)-2-deoxy-beta-D-galactopyra nosyl]oxy]-14,14-bis[[3-[[3-[[5-[[2-(acetylamino)-2-deoxy-b eta-D-galactopyranosyl]oxy]-1-oxopentyl]amino]propyl]amino] -3-oxopropoxy]methyl]-1,12,19,25-tetraoxo-16-oxa-13,20,24-t riazanonacos-1-yl]-4-hydroxy-2-pyrrolidinyl)methyl ester
aggcttcatgtcccactcata

SEQ ID NO: 519 - RNA, 21 nt, synthetic construct
  source 1..21: mol_type = other RNA
  modified_base 1: mod_base = OTHER; note = 2'-deoxy-2'-fluoroguanosine-3'-phosphorothioate
  modified_base 2: mod_base = OTHER; note = 2'-O-methylguanosine-3'-phosphorothioate
  modified_base 3: mod_base = OTHER; note = 2'-deoxy-2'-fluorocytidine-3'-phosphate
  modified_base 4: mod_base = OTHER; note = 2'-O-methyluridine-3'-phosphate
  modified_base 5: mod_base = OTHER; note = 2'-deoxy-2'-fluorocytidine-3'-phosphate
  modified_base 6: mod_base = OTHER; note = 2'-O-methylcytidine-3'-phosphate
  modified_base 7: mod_base = OTHER; note = 2'-deoxy-2'-fluoroguanosine-3'-phosphate
  modified_base 8: mod_base = OTHER; note = 2'-O-methylcytidine-3'-phosphate
  modified_base 9: mod_base = OTHER; note = 2'-deoxy-2'-fluoroadenosine-3'-phosphate
  modified_base 10: mod_base = OTHER; note = 2'-deoxy-2'-fluoroadenosine-3'-phosphate
  modified_base 11: mod_base = OTHER; note = 2'-deoxy-2'-fluoroguanosine-3'-phosphate
  modified_base 12: mod_base = OTHER; note = 2'-O-methyladenosine-3'-phosphate
  modified_base 13: mod_base = OTHER; note = 2'-deoxy-2'-fluoroguanosine-3'-phosphate
  modified_base 14: mod_base = OTHER; note = 2'-O-methyluridine-3'-phosphate
  modified_base 15: mod_base = OTHER; note = 2'-deoxy-2'-fluorocytidine-3'-phosphate
  modified_base 16: mod_base = OTHER; note = 2'-O-methyluridine-3'-phosphate
  modified_base 17: mod_base = OTHER; note = 2'-deoxy-2'-fluoroguanosine-3'-phosphate
  modified_base 18: mod_base = OTHER; note = 2'-O-methyluridine-3'-phosphate
  modified_base 19: mod_base = OTHER; note = 2'-deoxy-2'-fluorocytidine-3'-phosphate
  modified_base 20: mod_base = OTHER; note = 2'-O-methyluridine-3'-phosphate
  modified_base 21: mod_base = OTHER; note = 2'-deoxy-2'-fluorouridine-3'-phosphate ((2S,4R)-1-[29-[[2-(acetylamino)-2-deoxy-beta-D-galactopyra nosyl]oxy]-14,14-bis[[3-[[3-[[5-[[2-(acetylamino)-2-deoxy-b eta-D-galactopyranosyl]oxy]-1-oxopentyl]amino]propyl]amino] -3-oxopropoxy]methyl]-1,12,19,25-tetraoxo-16-oxa-13,20,24-t riazanonacos-1-yl]-4-hydroxy-2-pyrrolidinyl)methyl ester
ggctccgcaagagtctgtctt

SEQ ID NO: 520 - RNA, 21 nt, synthetic construct
  source 1..21: mol_type = other RNA
  modified_base 1: mod_base = OTHER; note = 2'-deoxy-2'-fluoroguanosine-3'-phosphorothioate
  modified_base 2: mod_base = OTHER; note = 2'-O-methylcytidine-3'-phosphorothioate
  modified_base 3: mod_base = OTHER; note = 2'-deoxy-2'-fluorouridine-3'-phosphate
  modified_base 4: mod_base = OTHER; note = 2'-O-methylcytidine-3'-phosphate
  modified_base 5: mod_base = OTHER; note = 2'-deoxy-2'-fluorocytidine-3'-phosphate
  modified_base 6: mod_base = OTHER; note = 2'-O-methylguanosine-3'-phosphate
  modified_base 7: mod_base = OTHER; note = 2'-deoxy-2'-fluorocytidine-3'-phosphate
  modified_base 8: mod_base = OTHER; note = 2'-O-methyladenosine-3'-phosphate
  modified_base 9: mod_base = OTHER; note = 2'-deoxy-2'-fluoroadenosine-3'-phosphate
  modified_base 10: mod_base = OTHER; note = 2'-deoxy-2'-fluoroguanosine-3'-phosphate
  modified_base 11: mod_base = OTHER; note = 2'-deoxy-2'-fluoroadenosine-3'-phosphate
  modified_base 12: mod_base = OTHER; note = 2'-O-methylguanosine-3'-phosphate
  modified_base 13: mod_base = OTHER; note = 2'-deoxy-2'-fluorouridine-3'-phosphate
  modified_base 14: mod_base = OTHER; note = 2'-O-methylcytidine-3'-phosphate
  modified_base 15: mod_base = OTHER; note = 2'-deoxy-2'-fluorouridine-3'-phosphate
  modified_base 16: mod_base = OTHER; note = 2'-O-methylguanosine-3'-phosphate
  modified_base 17: mod_base = OTHER; note = 2'-deoxy-2'-fluorouridine-3'-phosphate
  modified_base 18: mod_base = OTHER; note = 2'-O-methylcytidine-3'-phosphate
  modified_base 19: mod_base = OTHER; note = 2'-deoxy-2'-fluorouridine-3'-phosphate
  modified_base 20: mod_base = OTHER; note = 2'-O-methyluridine-3'-phosphate
  modified_base 21: mod_base = OTHER; note = 2'-deoxy-2'-fluoroadenosine-3'-phosphate ((2S,4R)-1-[29-[[2-(acetylamino)-2-deoxy-beta-D-galactopyra nosyl]oxy]-14,14-bis[[3-[[3-[[5-[[2-(acetylamino)-2-deoxy-b eta-D-galactopyranosyl]oxy]-1-oxopentyl]amino]propyl]amino] -3-oxopropoxy]methyl]-1,12,19,25-tetraoxo-16-oxa-13,20,24-t riazanonacos-1-yl]-4-hydroxy-2-pyrrolidinyl)methyl ester
gctccgcaagagtctgtctta

SEQ ID NO: 521 - RNA, 21 nt, synthetic construct
  source 1..21: mol_type = other RNA
  modified_base 1: mod_base = OTHER; note = 2'-deoxy-2'-fluorocytidine-3'-phosphorothioate
  modified_base 2: mod_base = OTHER; note = 2'-O-methylcytidine-3'-phosphorothioate
  modified_base 3: mod_base = OTHER; note = 2'-deoxy-2'-fluoroguanosine-3'-phosphate
  modified_base 4: mod_base = OTHER; note = 2'-O-methylcytidine-3'-phosphate
  modified_base 5: mod_base = OTHER; note = 2'-deoxy-2'-fluoroadenosine-3'-phosphate
  modified_base 6: mod_base = OTHER; note = 2'-O-methyladenosine-3'-phosphate
  modified_base 7: mod_base = OTHER; note = 2'-deoxy-2'-fluoroguanosine-3'-phosphate
  modified_base 8: mod_base = OTHER; note = 2'-O-methyladenosine-3'-phosphate
  modified_base 9: mod_base = OTHER; note = 2'-deoxy-2'-fluoroguanosine-3'-phosphate
  modified_base 10: mod_base = OTHER; note = 2'-deoxy-2'-fluorouridine-3'-phosphate
  modified_base 11: mod_base = OTHER; note = 2'-deoxy-2'-fluorocytidine-3'-phosphate
  modified_base 12: mod_base = OTHER; note = 2'-O-methyluridine-3'-phosphate
  modified_base 13: mod_base = OTHER; note = 2'-deoxy-2'-fluoroguanosine-3'-phosphate
  modified_base 14: mod_base = OTHER; note = 2'-O-methyluridine-3'-phosphate
  modified_base 15: mod_base = OTHER; note = 2'-deoxy-2'-fluorocytidine-3'-phosphate
  modified_base 16: mod_base = OTHER; note = 2'-O-methyluridine-3'-phosphate
  modified_base 17: mod_base = OTHER; note = 2'-deoxy-2'-fluorouridine-3'-phosphate
  modified_base 18: mod_base = OTHER; note = 2'-O-methylcytidine-3'-phosphate
  modified_base 19: mod_base = OTHER; note = 2'-deoxy-2'-fluoroguanosine-3'-phosphate
  modified_base 20: mod_base = OTHER; note = 2'-O-methyladenosine-3'-phosphate
  modified_base 21: mod_base = OTHER; note = 2'-deoxy-2'-fluorouridine-3'-phosphate ((2S,4R)-1-[29-[[2-(acetylamino)-2-deoxy-beta-D-galactopyra nosyl]oxy]-14,14-bis[[3-[[3-[[5-[[2-(acetylamino)-2-deoxy-b eta-D-galactopyranosyl]oxy]-1-oxopentyl]amino]propyl]amino] -3-oxopropoxy]methyl]-1,12,19,25-tetraoxo-16-oxa-13,20,24-t riazanonacos-1-yl]-4-hydroxy-2-pyrrolidinyl)methyl ester
ccgcaagagtctgtcttcgat

SEQ ID NO: 522 - RNA, 21 nt, synthetic construct
  source 1..21: mol_type = other RNA
  modified_base 1: mod_base = OTHER; note = 2'-deoxy-2'-fluoroguanosine-3'-phosphorothioate
  modified_base 2: mod_base = OTHER; note = 2'-O-methyluridine-3'-phosphorothioate
  modified_base 3: mod_base = OTHER; note = 2'-deoxy-2'-fluorouridine-3'-phosphate
  modified_base 4: mod_base = OTHER; note = 2'-O-methylcytidine-3'-phosphate
  modified_base 5: mod_base = OTHER; note = 2'-deoxy-2'-fluoroguanosine-3'-phosphate
  modified_base 6: mod_base = OTHER; note = 2'-O-methyladenosine-3'-phosphate
  modified_base 7: mod_base = OTHER; note = 2'-deoxy-2'-fluoroguanosine-3'-phosphate
  modified_base 8: mod_base = OTHER; note = 2'-O-methylguanosine-3'-phosphate
  modified_base 9: mod_base = OTHER; note = 2'-deoxy-2'-fluoroguanosine-3'-phosphate
  modified_base 10: mod_base = OTHER; note = 2'-deoxy-2'-fluoroguanosine-3'-phosphate
  modified_base 11: mod_base = OTHER; note = 2'-deoxy-2'-fluoroguanosine-3'-phosphate
  modified_base 12: mod_base = OTHER; note = 2'-O-methylcytidine-3'-phosphate
  modified_base 13: mod_base = OTHER; note = 2'-deoxy-2'-fluorouridine-3'-phosphate
  modified_base 14: mod_base = OTHER; note = 2'-O-methylguanosine-3'-phosphate
  modified_base 15: mod_base = OTHER; note = 2'-deoxy-2'-fluoroadenosine-3'-phosphate
  modified_base 16: mod_base = OTHER; note = 2'-O-methyladenosine-3'-phosphate
  modified_base 17: mod_base = OTHER; note = 2'-deoxy-2'-fluoroguanosine-3'-phosphate
  modified_base 18: mod_base = OTHER; note = 2'-O-methyladenosine-3'-phosphate
  modified_base 19: mod_base = OTHER; note = 2'-deoxy-2'-fluoroadenosine-3'-phosphate
  modified_base 20: mod_base = OTHER; note = 2'-O-methyluridine-3'-phosphate
  modified_base 21: mod_base = OTHER; note = 2'-deoxy-2'-fluoroadenosine-3'-phosphate ((2S,4R)-1-[29-[[2-(acetylamino)-2-deoxy-beta-D-galactopyra nosyl]oxy]-14,14-bis[[3-[[3-[[5-[[2-(acetylamino)-2-deoxy-b eta-D-galactopyranosyl]oxy]-1-oxopentyl]amino]propyl]amino] -3-oxopropoxy]methyl]-1,12,19,25-tetraoxo-16-oxa-13,20,24-t riazanonacos-1-yl]-4-hydroxy-2-pyrrolidinyl)methyl ester
gttcgagggggctgaagaata

SEQ ID NO: 523 - RNA, 21 nt, synthetic construct
  source 1..21: mol_type = other RNA
  modified_base 1: mod_base = OTHER; note = 2'-deoxy-2'-fluoroguanosine-3'-phosphorothioate
  modified_base 2: mod_base = OTHER; note = 2'-O-methylguanosine-3'-phosphorothioate
  modified_base 3: mod_base = OTHER; note = 2'-deoxy-2'-fluoroadenosine-3'-phosphate
  modified_base 4: mod_base = OTHER; note = 2'-O-methyladenosine-3'-phosphate
  modified_base 5: mod_base = OTHER; note = 2'-deoxy-2'-fluoroguanosine-3'-phosphate
  modified_base 6: mod_base = OTHER; note = 2'-O-methylguanosine-3'-phosphate
  modified_base 7: mod_base = OTHER; note = 2'-deoxy-2'-fluorocytidine-3'-phosphate
  modified_base 8: mod_base = OTHER; note = 2'-O-methyladenosine-3'-phosphate
  modified_base 9: mod_base = OTHER; note = 2'-deoxy-2'-fluoroadenosine-3'-phosphate
  modified_base 10: mod_base = OTHER; note = 2'-deoxy-2'-fluoroguanosine-3'-phosphate
  modified_base 11: mod_base = OTHER; note = 2'-deoxy-2'-fluoroadenosine-3'-phosphate
  modified_base 12: mod_base = OTHER; note = 2'-O-methyluridine-3'-phosphate
  modified_base 13: mod_base = OTHER; note = 2'-deoxy-2'-fluorouridine-3'-phosphate
  modified_base 14: mod_base = OTHER; note = 2'-O-methylguanosine-3'-phosphate
  modified_base 15: mod_base = OTHER; note = 2'-deoxy-2'-fluorouridine-3'-phosphate
  modified_base 16: mod_base = OTHER; note = 2'-O-methylguanosine-3'-phosphate
  modified_base 17: mod_base = OTHER; note = 2'-deoxy-2'-fluorouridine-3'-phosphate
  modified_base 18: mod_base = OTHER; note = 2'-O-methylcytidine-3'-phosphate
  modified_base 19: mod_base = OTHER; note = 2'-deoxy-2'-fluorocytidine-3'-phosphate
  modified_base 20: mod_base = OTHER; note = 2'-O-methylcytidine-3'-phosphate
  modified_base 21: mod_base = OTHER; note = 2'-deoxy-2'-fluoroadenosine-3'-phosphate ((2S,4R)-1-[29-[[2-(acetylamino)-2-deoxy-beta-D-galactopyra nosyl]oxy]-14,14-bis[[3-[[3-[[5-[[2-(acetylamino)-2-deoxy-b eta-D-galactopyranosyl]oxy]-1-oxopentyl]amino]propyl]amino] -3-oxopropoxy]methyl]-1,12,19,25-tetraoxo-16-oxa-13,20,24-t riazanonacos-1-yl]-4-hydroxy-2-pyrrolidinyl)methyl ester
ggaaggcaagattgtgtccca

SEQ ID NO: 524 - RNA, 21 nt, synthetic construct
  source 1..21: mol_type = other RNA
  modified_base 1: mod_base = OTHER; note = 2'-deoxy-2'-fluoroadenosine-3'-phosphorothioate
  modified_base 2: mod_base = OTHER; note = 2'-O-methylguanosine-3'-phosphorothioate
  modified_base 3: mod_base = OTHER; note = 2'-deoxy-2'-fluoroguanosine-3'-phosphate
  modified_base 4: mod_base = OTHER; note = 2'-O-methylcytidine-3'-phosphate
  modified_base 5: mod_base = OTHER; note = 2'-deoxy-2'-fluoroadenosine-3'-phosphate
  modified_base 6: mod_base = OTHER; note = 2'-O-methyladenosine-3'-phosphate
  modified_base 7: mod_base = OTHER; note = 2'-deoxy-2'-fluoroguanosine-3'-phosphate
  modified_base 8: mod_base = OTHER; note = 2'-O-methyladenosine-3'-phosphate
  modified_base 9: mod_base = OTHER; note = 2'-deoxy-2'-fluorouridine-3'-phosphate
  modified_base 10: mod_base = OTHER; note = 2'-deoxy-2'-fluorouridine-3'-phosphate
  modified_base 11: mod_base = OTHER; note = 2'-deoxy-2'-fluoroguanosine-3'-phosphate
  modified_base 12: mod_base = OTHER; note = 2'-O-methyluridine-3'-phosphate
  modified_base 13: mod_base = OTHER; note = 2'-deoxy-2'-fluoroguanosine-3'-phosphate
  modified_base 14: mod_base = OTHER; note = 2'-O-methyluridine-3'-phosphate
  modified_base 15: mod_base = OTHER; note = 2'-deoxy-2'-fluorocytidine-3'-phosphate
  modified_base 16: mod_base = OTHER; note = 2'-O-methylcytidine-3'-phosphate
  modified_base 17: mod_base = OTHER; note = 2'-deoxy-2'-fluorocytidine-3'-phosphate
  modified_base 18: mod_base = OTHER; note = 2'-O-methyladenosine-3'-phosphate
  modified_base 19: mod_base = OTHER; note = 2'-deoxy-2'-fluorouridine-3'-phosphate
  modified_base 20: mod_base = OTHER; note = 2'-O-methyluridine-3'-phosphate
  modified_base 21: mod_base = OTHER; note = 2'-deoxy-2'-fluoroadenosine-3'-phosphate ((2S,4R)-1-[29-[[2-(acetylamino)-2-deoxy-beta-D-galactopyra nosyl]oxy]-14,14-bis[[3-[[3-[[5-[[2-(acetylamino)-2-deoxy-b eta-D-galactopyranosyl]oxy]-1-oxopentyl]amino]propyl]amino] -3-oxopropoxy]methyl]-1,12,19,25-tetraoxo-16-oxa-13,20,24-t riazanonacos-1-yl]-4-hydroxy-2-pyrrolidinyl)methyl ester
aggcaagattgtgtcccatta

SEQ ID NO: 525 - RNA, 21 nt, synthetic construct
  source 1..21: mol_type = other RNA
  modified_base 1: mod_base = OTHER; note = 2'-deoxy-2'-fluoroadenosine-3'-phosphorothioate
  modified_base 2: mod_base = OTHER; note = 2'-O-methyladenosine-3'-phosphorothioate
  modified_base 3: mod_base = OTHER; note = 2'-deoxy-2'-fluorocytidine-3'-phosphate
  modified_base 4: mod_base = OTHER; note = 2'-O-methyluridine-3'-phosphate
  modified_base 5: mod_base = OTHER; note = 2'-deoxy-2'-fluorocytidine-3'-phosphate
  modified_base 6: mod_base = OTHER; note = 2'-O-methyladenosine-3'-phosphate
  modified_base 7: mod_base = OTHER; note = 2'-deoxy-2'-fluoroadenosine-3'-phosphate
  modified_base 8: mod_base = OTHER; note = 2'-O-methyluridine-3'-phosphate
  modified_base 9: mod_base = OTHER; note = 2'-deoxy-2'-fluoroadenosine-3'-phosphate
  modified_base 10: mod_base = OTHER; note = 2'-deoxy-2'-fluoroadenosine-3'-phosphate
  modified_base 11: mod_base = OTHER; note = 2'-deoxy-2'-fluoroadenosine-3'-phosphate
  modified_base 12: mod_base = OTHER; note = 2'-O-methylguanosine-3'-phosphate
  modified_base 13: mod_base = OTHER; note = 2'-deoxy-2'-fluorouridine-3'-phosphate
  modified_base 14: mod_base = OTHER; note = 2'-O-methylguanosine-3'-phosphate
  modified_base 15: mod_base = OTHER; note = 2'-deoxy-2'-fluorocytidine-3'-phosphate
  modified_base 16: mod_base = OTHER; note = 2'-O-methyluridine-3'-phosphate
  modified_base 17: mod_base = OTHER; note = 2'-deoxy-2'-fluorouridine-3'-phosphate
  modified_base 18: mod_base = OTHER; note = 2'-O-methyluridine-3'-phosphate
  modified_base 19: mod_base = OTHER; note = 2'-deoxy-2'-fluoroguanosine-3'-phosphate
  modified_base 20: mod_base = OTHER; note = 2'-O-methyladenosine-3'-phosphate
  modified_base 21: mod_base = OTHER; note = 2'-deoxy-2'-fluoroadenosine-3'-phosphate ((2S,4R)-1-[29-[[2-(acetylamino)-2-deoxy-beta-D-galactopyra nosyl]oxy]-14,14-bis[[3-[[3-[[5-[[2-(acetylamino)-2-deoxy-b eta-D-galactopyranosyl]oxy]-1-oxopentyl]amino]propyl]amino] -3-oxopropoxy]methyl]-1,12,19,25-tetraoxo-16-oxa-13,20,24-t riazanonacos-1-yl]-4-hydroxy-2-pyrrolidinyl)methyl ester
aactcaataaagtgctttgaa

SEQ ID NO: 526 - RNA, 21 nt, synthetic construct
  source 1..21: mol_type = other RNA
  modified_base 1: mod_base = OTHER; note = 2'-deoxy-2'-fluoroadenosine-3'-phosphorothioate
  modified_base 2: mod_base = OTHER; note = 2'-O-methyladenosine-3'-phosphorothioate
  modified_base 3: mod_base = OTHER; note = 2'-deoxy-2'-fluorouridine-3'-phosphate
  modified_base 4: mod_base = OTHER; note = 2'-O-methyladenosine-3'-phosphate
  modified_base 5: mod_base = OTHER; note = 2'-deoxy-2'-fluoroadenosine-3'-phosphate
  modified_base 6: mod_base = OTHER; note = 2'-O-methyladenosine-3'-phosphate
  modified_base 7: mod_base = OTHER; note = 2'-deoxy-2'-fluoroguanosine-3'-phosphate
  modified_base 8: mod_base = OTHER; note = 2'-O-methyluridine-3'-phosphate
  modified_base 9: mod_base = OTHER; note = 2'-deoxy-2'-fluoroguanosine-3'-phosphate
  modified_base 10: mod_base = OTHER; note = 2'-deoxy-2'-fluorocytidine-3'-phosphate
  modified_base 11: mod_base = OTHER; note = 2'-deoxy-2'-fluorouridine-3'-phosphate
  modified_base 12: mod_base = OTHER; note = 2'-O-methyluridine-3'-phosphate
  modified_base 13: mod_base = OTHER; note = 2'-deoxy-2'-fluorouridine-3'-phosphate
  modified_base 14: mod_base = OTHER; note = 2'-O-methylguanosine-3'-phosphate
  modified_base 15: mod_base = OTHER; note = 2'-deoxy-2'-fluoroadenosine-3'-phosphate
  modified_base 16: mod_base = OTHER; note = 2'-O-methyladenosine-3'-phosphate
  modified_base 17: mod_base = OTHER; note = 2'-deoxy-2'-fluoroadenosine-3'-phosphate
  modified_base 18: mod_base = OTHER; note = 2'-O-methyladenosine-3'-phosphate
  modified_base 19: mod_base = OTHER; note = 2'-deoxy-2'-fluorocytidine-3'-phosphate
  modified_base 20: mod_base = OTHER; note = 2'-O-methylguanosine-3'-phosphate
  modified_base 21: mod_base = OTHER; note = 2'-deoxy-2'-fluorouridine-3'-phosphate ((2S,4R)-1-[29-[[2-(acetylamino)-2-deoxy-beta-D-galactopyra nosyl]oxy]-14,14-bis[[3-[[3-[[5-[[2-(acetylamino)-2-deoxy-b eta-D-galactopyranosyl]oxy]-1-oxopentyl]amino]propyl]amino] -3-oxopropoxy]methyl]-1,12,19,25-tetraoxo-16-oxa-13,20,24-t riazanonacos-1-yl]-4-hydroxy-2-pyrrolidinyl)methyl ester
aataaagtgctttgaaaacgt

SEQ ID NO: 527 - RNA, 21 nt, synthetic construct
  source 1..21: mol_type = other RNA
  modified_base 1: mod_base = OTHER; note = 2'-deoxy-2'-fluoroadenosine-3'-phosphorothioate
  modified_base 2: mod_base = OTHER; note = 2'-O-methylguanosine-3'-phosphorothioate
  modified_base 3: mod_base = OTHER; note = 2'-deoxy-2'-fluorouridine-3'-phosphate
  modified_base 4: mod_base = OTHER; note = 2'-O-methylguanosine-3'-phosphate
  modified_base 5: mod_base = OTHER; note = 2'-deoxy-2'-fluorocytidine-3'-phosphate
  modified_base 6: mod_base = OTHER; note = 2'-O-methyluridine-3'-phosphate
  modified_base 7: mod_base = OTHER; note = 2'-deoxy-2'-fluorouridine-3'-phosphate
  modified_base 8: mod_base = OTHER; note = 2'-O-methyluridine-3'-phosphate
  modified_base 9: mod_base = OTHER; note = 2'-deoxy-2'-fluoroguanosine-3'-phosphate
  modified_base 10: mod_base = OTHER; note = 2'-deoxy-2'-fluoroadenosine-3'-phosphate
  modified_base 11: mod_base = OTHER; note = 2'-deoxy-2'-fluoroadenosine-3'-phosphate
  modified_base 12: mod_base = OTHER; note = 2'-O-methyladenosine-3'-phosphate
  modified_base 13: mod_base = OTHER; note = 2'-deoxy-2'-fluoroadenosine-3'-phosphate
  modified_base 14: mod_base = OTHER; note = 2'-O-methyluridine-3'-phosphate
  modified_base 15: mod_base = OTHER; note = 2'-deoxy-2'-fluoroguanosine-3'-phosphate
  modified_base 16: mod_base = OTHER; note = 2'-O-methylcytidine-3'-phosphate
  modified_base 17: mod_base = OTHER; note = 2'-deoxy-2'-fluorouridine-3'-phosphate
  modified_base 18: mod_base = OTHER; note = 2'-O-methylguanosine-3'-phosphate
  modified_base 19: mod_base = OTHER; note = 2'-deoxy-2'-fluoroadenosine-3'-phosphate
  modified_base 20: mod_base = OTHER; note = 2'-O-methylguanosine-3'-phosphate
  modified_base 21: mod_base = OTHER; note = 2'-deoxy-2'-fluoroadenosine-3'-phosphate ((2S,4R)-1-[29-[[2-(acetylamino)-2-deoxy-beta-D-galactopyra nosyl]oxy]-14,14-bis[[3-[[3-[[5-[[2-(acetylamino)-2-deoxy-b eta-D-galactopyranosyl]oxy]-1-oxopentyl]amino]propyl]amino] -3-oxopropoxy]methyl]-1,12,19,25-tetraoxo-16-oxa-13,20,24-t riazanonacos-1-yl]-4-hydroxy-2-pyrrolidinyl)methyl ester
agtgctttgaaaatgctgaga

SEQ ID NO: 528 - RNA, 23 nt, synthetic construct
  source 1..23: mol_type = other RNA
  modified_base 1: mod_base = OTHER; note = 2'-O-methyladenosine-3'-phosphorothioate
  modified_base 2: mod_base = OTHER; note = 2'-deoxy-2'-fluoroguanosine-3'-phosphorothioate
  modified_base 3: mod_base = OTHER; note = 2'-O-methyluridine-3'-phosphate
  modified_base 4: mod_base = OTHER; note = 2'-deoxy-2'-fluoroguanosine-3'-phosphate
  modified_base 5: mod_base = OTHER; note = 2'-O-methyluridine-3'-phosphate
  modified_base 6: mod_base = OTHER; note = 2'-deoxy-2'-fluorouridine-3'-phosphate
  modified_base 7: mod_base = OTHER; note = 2'-O-methylguanosine-3'-phosphate
  modified_base 8: mod_base = OTHER; note = 2'-deoxy-2'-fluoroadenosine-3'-phosphate
  modified_base 9: mod_base = OTHER; note = 2'-O-methylcytidine-3'-phosphate
  modified_base 10: mod_base = OTHER; note = 2'-deoxy-2'-fluorouridine-3'-phosphate
  modified_base 11: mod_base = OTHER; note = 2'-O-methylcytidine-3'-phosphate
  modified_base 12: mod_base = OTHER; note = 2'-O-methylcytidine-3'-phosphate
  modified_base 13: mod_base = OTHER; note = 2'-O-methyladenosine-3'-phosphate
  modified_base 14: mod_base = OTHER; note = 2'-deoxy-2'-fluoroadenosine-3'-phosphate
  modified_base 15: mod_base = OTHER; note = 2'-O-methylguanosine-3'-phosphate
  modified_base 16: mod_base = OTHER; note = 2'-deoxy-2'-fluorocytidine-3'-phosphate
  modified_base 17: mod_base = OTHER; note = 2'-O-methyluridine-3'-phosphate
  modified_base 18: mod_base = OTHER; note = 2'-deoxy-2'-fluorocytidine-3'-phosphate
  modified_base 19: mod_base = OTHER; note = 2'-O-methyladenosine-3'-phosphate
  modified_base 20: mod_base = OTHER; note = 2'-deoxy-2'-fluorocytidine-3'-phosphate
  modified_base 21: mod_base = OTHER; note = 2'-O-methylcytidine-3'-phosphorothioate
  modified_base 22: mod_base = OTHER; note = 2'-O-methyladenosine-3'-phosphorothioate
  modified_base 23: mod_base = OTHER; note = 2'-O-methylguanosine
agtgttgactccaagctcaccag

SEQ ID NO: 529 - RNA, 23 nt, synthetic construct
  source 1..23: mol_type = other RNA
  modified_base 1: mod_base = OTHER; note = 2'-O-methyluridine-3'-phosphorothioate
  modified_base 2: mod_base = OTHER; note = 2'-deoxy-2'-fluoroadenosine-3'-phosphorothioate
  modified_base 3: mod_base = OTHER; note = 2'-O-methyladenosine-3'-phosphate
  modified_base 4: mod_base = OTHER; note = 2'-deoxy-2'-fluoroadenosine-3'-phosphate
  modified_base 5: mod_base = OTHER; note = 2'-O-methylguanosine-3'-phosphate
  modified_base 6: mod_base = OTHER; note = 2'-deoxy-2'-fluorouridine-3'-phosphate
  modified_base 7: mod_base = OTHER; note = 2'-O-methylguanosine-3'-phosphate
  modified_base 8: mod_base = OTHER; note = 2'-deoxy-2'-fluorouridine-3'-phosphate
  modified_base 9: mod_base = OTHER; note = 2'-O-methyluridine-3'-phosphate
  modified_base 10: mod_base = OTHER; note = 2'-deoxy-2'-fluoroguanosine-3'-phosphate
  modified_base 11: mod_base = OTHER; note = 2'-O-methyladenosine-3'-phosphate
  modified_base 12: mod_base = OTHER; note = 2'-O-methylcytidine-3'-phosphate
  modified_base 13: mod_base = OTHER; note = 2'-O-methyluridine-3'-phosphate
  modified_base 14: mod_base = OTHER; note = 2'-deoxy-2'-fluorocytidine-3'-phosphate
  modified_base 15: mod_base = OTHER; note = 2'-O-methylcytidine-3'-phosphate
  modified_base 16: mod_base = OTHER; note = 2'-deoxy-2'-fluoroadenosine-3'-phosphate
  modified_base 17: mod_base = OTHER; note = 2'-O-methyladenosine-3'-phosphate
  modified_base 18: mod_base = OTHER; note = 2'-deoxy-2'-fluoroguanosine-3'-phosphate
  modified_base 19: mod_base = OTHER; note = 2'-O-methylcytidine-3'-phosphate
  modified_base 20: mod_base = OTHER; note = 2'-deoxy-2'-fluorouridine-3'-phosphate
  modified_base 21: mod_base = OTHER; note = 2'-O-methylcytidine-3'-phosphorothioate
  modified_base 22: mod_base = OTHER; note = 2'-O-methyladenosine-3'-phosphorothioate
  modified_base 23: mod_base = OTHER; note = 2'-O-methylcytidine
taaagtgttgactccaagctcac

SEQ ID NO: 530 - RNA, 23 nt, synthetic construct
  source 1..23: mol_type = other RNA
  modified_base 1: mod_base = OTHER; note = 2'-O-methyladenosine-3'-phosphorothioate
  modified_base 2: mod_base = OTHER; note = 2'-deoxy-2'-fluorouridine-3'-phosphorothioate
  modified_base 3: mod_base = OTHER; note = 2'-O-methylcytidine-3'-phosphate
  modified_base 4: mod_base = OTHER; note = 2'-deoxy-2'-fluoroguanosine-3'-phosphate
  modified_base 5: mod_base = OTHER; note = 2'-O-methyladenosine-3'-phosphate
  modified_base 6: mod_base = OTHER; note = 2'-deoxy-2'-fluoroadenosine-3'-phosphate
  modified_base 7: mod_base = OTHER; note = 2'-O-methyladenosine-3'-phosphate
  modified_base 8: mod_base = OTHER; note = 2'-deoxy-2'-fluoroguanosine-3'-phosphate
  modified_base 9: mod_base = OTHER; note = 2'-O-methyluridine-3'-phosphate
  modified_base 10: mod_base = OTHER; note = 2'-deoxy-2'-fluoroguanosine-3'-phosphate
  modified_base 11: mod_base = OTHER; note = 2'-O-methyluridine-3'-phosphate
  modified_base 12: mod_base = OTHER; note = 2'-O-methyluridine-3'-phosphate
  modified_base 13: mod_base = OTHER; note = 2'-O-methylguanosine-3'-phosphate
  modified_base 14: mod_base = OTHER; note = 2'-deoxy-2'-fluoroadenosine-3'-phosphate
  modified_base 15: mod_base = OTHER; note = 2'-O-methylcytidine-3'-phosphate
  modified_base 16: mod_base = OTHER; note = 2'-deoxy-2'-fluorouridine-3'-phosphate
  modified_base 17: mod_base = OTHER; note = 2'-O-methylcytidine-3'-phosphate
  modified_base 18: mod_base = OTHER; note = 2'-deoxy-2'-fluorocytidine-3'-phosphate
  modified_base 19: mod_base = OTHER; note = 2'-O-methyladenosine-3'-phosphate
  modified_base 20: mod_base = OTHER; note = 2'-deoxy-2'-fluoroadenosine-3'-phosphate
  modified_base 21: mod_base = OTHER; note = 2'-O-methylguanosine-3'-phosphorothioate
  modified_base 22: mod_base = OTHER; note = 2'-O-methylcytidine-3'-phosphorothioate
  modified_base 23: mod_base = OTHER; note = 2'-O-methyluridine
atcgaaagtgttgactccaagct

SEQ ID NO: 531 - RNA, 23 nt, synthetic construct
  source 1..23: mol_type = other RNA
  modified_base 1: mod_base = OTHER; note = 2'-O-methyladenosine-3'-phosphorothioate
  modified_base 2: mod_base = OTHER; note = 2'-deoxy-2'-fluoroadenosine-3'-phosphorothioate
  modified_base 3: mod_base = OTHER; note = 2'-O-methyluridine-3'-phosphate
  modified_base 4: mod_base = OTHER; note = 2'-deoxy-2'-fluorocytidine-3'-phosphate
  modified_base 5: mod_base = OTHER; note = 2'-O-methylguanosine-3'-phosphate
  modified_base 6: mod_base = OTHER; note = 2'-deoxy-2'-fluoroadenosine-3'-phosphate
  modified_base 7: mod_base = OTHER; note = 2'-O-methyladenosine-3'-phosphate
  modified_base 8: mod_base = OTHER; note = 2'-deoxy-2'-fluoroadenosine-3'-phosphate
  modified_base 9: mod_base = OTHER; note = 2'-O-methylguanosine-3'-phosphate
  modified_base 10: mod_base = OTHER; note = 2'-deoxy-2'-fluorouridine-3'-phosphate
  modified_base 11: mod_base = OTHER; note = 2'-O-methylguanosine-3'-phosphate
  modified_base 12: mod_base = OTHER; note = 2'-O-methyluridine-3'-phosphate
  modified_base 13: mod_base = OTHER; note = 2'-O-methyluridine-3'-phosphate
  modified_base 14: mod_base = OTHER; note = 2'-deoxy-2'-fluoroguanosine-3'-phosphate
  modified_base 15: mod_base = OTHER; note = 2'-O-methyladenosine-3'-phosphate
  modified_base 16: mod_base = OTHER; note = 2'-deoxy-2'-fluorocytidine-3'-phosphate
  modified_base 17: mod_base = OTHER; note = 2'-O-methyluridine-3'-phosphate
  modified_base 18: mod_base = OTHER; note = 2'-deoxy-2'-fluorocytidine-3'-phosphate
  modified_base 19: mod_base = OTHER; note = 2'-O-methylcytidine-3'-phosphate
  modified_base 20: mod_base = OTHER; note = 2'-deoxy-2'-fluoroadenosine-3'-phosphate
  modified_base 21: mod_base = OTHER; note = 2'-O-methyladenosine-3'-phosphorothioate
  modified_base 22: mod_base = OTHER; note = 2'-O-methylguanosine-3'-phosphorothioate
  modified_base 23: mod_base = OTHER; note = 2'-O-methylcytidine
aatcgaaagtgttgactccaagc

SEQ ID NO: 532 - RNA, 23 nt, synthetic construct
  source 1..23: mol_type = other RNA
  modified_base 1: mod_base = OTHER; note = 2'-O-methyluridine-3'-phosphorothioate
  modified_base 2: mod_base = OTHER; note = 2'-deoxy-2'-fluoroadenosine-3'-phosphorothioate
  modified_base 3: mod_base = OTHER; note = 2'-O-methyladenosine-3'-phosphate
  modified_base 4: mod_base = OTHER; note = 2'-deoxy-2'-fluoroguanosine-3'-phosphate
  modified_base 5: mod_base = OTHER; note = 2'-O-methylguanosine-3'-phosphate
  modified_base 6: mod_base = OTHER; note = 2'-deoxy-2'-fluorouridine-3'-phosphate
  modified_base 7: mod_base = OTHER; note = 2'-O-methylguanosine-3'-phosphate
  modified_base 8: mod_base = OTHER; note = 2'-deoxy-2'-fluoroguanosine-3'-phosphate
  modified_base 9: mod_base = OTHER; note = 2'-O-methyladenosine-3'-phosphate
  modified_base 10: mod_base = OTHER; note = 2'-deoxy-2'-fluoroadenosine-3'-phosphate
  modified_base 11: mod_base = OTHER; note = 2'-O-methyluridine-3'-phosphate
  modified_base 12: mod_base = OTHER; note = 2'-O-methylcytidine-3'-phosphate
  modified_base 13: mod_base = OTHER; note = 2'-O-methylguanosine-3'-phosphate
  modified_base 14: mod_base = OTHER; note = 2'-deoxy-2'-fluoroadenosine-3'-phosphate
  modified_base 15: mod_base = OTHER; note = 2'-O-methyladenosine-3'-phosphate
  modified_base 16: mod_base = OTHER; note = 2'-deoxy-2'-fluoroadenosine-3'-phosphate
  modified_base 17: mod_base = OTHER; note = 2'-O-methylguanosine-3'-phosphate
  modified_base 18: mod_base = OTHER; note = 2'-deoxy-2'-fluorouridine-3'-phosphate
  modified_base 19: mod_base = OTHER; note = 2'-O-methylguanosine-3'-phosphate
  modified_base 20: mod_base = OTHER; note = 2'-deoxy-2'-fluorouridine-3'-phosphate
  modified_base 21: mod_base = OTHER; note = 2'-O-methyluridine-3'-phosphorothioate
  modified_base 22: mod_base = OTHER; note = 2'-O-methylguanosine-3'-phosphorothioate
  modified_base 23: mod_base = OTHER; note = 2'-O-methyladenosine
taaggtggaatcgaaagtgttga

SEQ ID NO: 533 - RNA, 23 nt, synthetic construct
  source 1..23: mol_type = other RNA
  modified_base 1: mod_base = OTHER; note = 2'-O-methyluridine-3'-phosphorothioate
  modified_base 2: mod_base = OTHER; note = 2'-deoxy-2'-fluoroadenosine-3'-phosphorothioate
  modified_base 3: mod_base = OTHER; note = 2'-O-methylguanosine-3'-phosphate
  modified_base 4: mod_base = OTHER; note = 2'-deoxy-2'-fluorocytidine-3'-phosphate
  modified_base 5: mod_base = OTHER; note = 2'-O-methyluridine-3'-phosphate
  modified_base 6: mod_base = OTHER; note = 2'-deoxy-2'-fluorouridine-3'-phosphate
  modified_base 7: mod_base = OTHER; note = 2'-O-methyluridine-3'-phosphate
  modified_base 8: mod_base = OTHER; note = 2'-deoxy-2'-fluoroguanosine-3'-phosphate
  modified_base 9: mod_base = OTHER; note = 2'-O-methyluridine-3'-phosphate
  modified_base 10: mod_base = OTHER; note = 2'-deoxy-2'-fluoroadenosine-3'-phosphate
  modified_base 11: mod_base = OTHER; note = 2'-O-methylcytidine-3'-phosphate
  modified_base 12: mod_base = OTHER; note = 2'-O-methyluridine-3'-phosphate
  modified_base 13: mod_base = OTHER; note = 2'-O-methyluridine-3'-phosphate
  modified_base 14: mod_base = OTHER; note = 2'-deoxy-2'-fluoroadenosine-3'-phosphate
  modified_base 15: mod_base = OTHER; note = 2'-O-methyluridine-3'-phosphate
  modified_base 16: mod_base = OTHER; note = 2'-deoxy-2'-fluoroguanosine-3'-phosphate
  modified_base 17: mod_base = OTHER; note = 2'-O-methylcytidine-3'-phosphate
  modified_base 18: mod_base = OTHER; note = 2'-deoxy-2'-fluorouridine-3'-phosphate
  modified_base 19: mod_base = OTHER; note = 2'-O-methylcytidine-3'-phosphate
  modified_base 20: mod_base = OTHER; note = 2'-deoxy-2'-fluorocytidine-3'-phosphate
  modified_base 21: mod_base = OTHER; note = 2'-O-methyluridine-3'-phosphorothioate
  modified_base 22: mod_base = OTHER; note = 2'-O-methyluridine-3'-phosphorothioate
  modified_base 23: mod_base = OTHER; note = 2'-O-methylguanosine
tagctttgtacttatgctccttg

SEQ ID NO: 534 - RNA, 23 nt, synthetic construct
  source 1..23: mol_type = other RNA
  modified_base 1: mod_base = OTHER; note = 2'-O-methyluridine-3'-phosphorothioate
  modified_base 2: mod_base = OTHER; note = 2'-deoxy-2'-fluorouridine-3'-phosphorothioate
  modified_base 3: mod_base = OTHER; note = 2'-O-methylcytidine-3'-phosphate
  modified_base 4: mod_base = OTHER; note = 2'-deoxy-2'-fluoroadenosine-3'-phosphate
  modified_base 5: mod_base = OTHER; note = 2'-O-methylguanosine-3'-phosphate
  modified_base 6: mod_base = OTHER; note = 2'-deoxy-2'-fluorocytidine-3'-phosphate
  modified_base 7: mod_base = OTHER; note = 2'-O-methyluridine-3'-phosphate
  modified_base 8: mod_base = OTHER; note = 2'-deoxy-2'-fluorouridine-3'-phosphate
  modified_base 9: mod_base = OTHER; note = 2'-O-methyluridine-3'-phosphate
  modified_base 10: mod_base = OTHER; note = 2'-deoxy-2'-fluoroguanosine-3'-phosphate
  modified_base 11: mod_base = OTHER; note = 2'-O-methyluridine-3'-phosphate
  modified_base 12: mod_base = OTHER; note = 2'-O-methyladenosine-3'-phosphate
  modified_base 13: mod_base = OTHER; note = 2'-O-methylcytidine-3'-phosphate
  modified_base 14: mod_base = OTHER; note = 2'-deoxy-2'-fluorouridine-3'-phosphate
  modified_base 15: mod_base = OTHER; note = 2'-O-methyluridine-3'-phosphate
  modified_base 16: mod_base = OTHER; note = 2'-deoxy-2'-fluoroadenosine-3'-phosphate
  modified_base 17: mod_base = OTHER; note = 2'-O-methyluridine-3'-phosphate
  modified_base 18: mod_base = OTHER; note = 2'-deoxy-2'-fluoroguanosine-3'-phosphate
  modified_base 19: mod_base = OTHER; note = 2'-O-methylcytidine-3'-phosphate
  modified_base 20: mod_base = OTHER; note = 2'-deoxy-2'-fluorouridine-3'-phosphate
  modified_base 21: mod_base = OTHER; note = 2'-O-methylcytidine-3'-phosphorothioate
  modified_base 22: mod_base = OTHER; note = 2'-O-methylcytidine-3'-phosphorothioate
  modified_base 23: mod_base = OTHER; note = 2'-O-methyluridine
ttcagctttgtacttatgctcct

SEQ ID NO: 535 - RNA, 23 nt, synthetic construct
  source 1..23: mol_type = other RNA
  modified_base 1: mod_base = OTHER; note = 2'-O-methyluridine-3'-phosphorothioate
  modified_base 2: mod_base = OTHER; note = 2'-deoxy-2'-fluoroguanosine-3'-phosphorothioate
  modified_base 3: mod_base = OTHER; note = 2'-O-methylcytidine-3'-phosphate
  modified_base 4: mod_base = OTHER; note = 2'-deoxy-2'-fluorouridine-3'-phosphate
  modified_base 5: mod_base = OTHER; note = 2'-O-methylcytidine-3'-phosphate
  modified_base 6: mod_base = OTHER; note = 2'-deoxy-2'-fluorouridine-3'-phosphate
  modified_base 7: mod_base = OTHER; note = 2'-O-methyluridine-3'-phosphate
  modified_base 8: mod_base = OTHER; note = 2'-deoxy-2'-fluorocytidine-3'-phosphate
  modified_base 9: mod_base = OTHER; note = 2'-O-methyladenosine-3'-phosphate
  modified_base 10: mod_base = OTHER; note = 2'-deoxy-2'-fluoroguanosine-3'-phosphate
  modified_base 11: mod_base = OTHER; note = 2'-O-methylcytidine-3'-phosphate
  modified_base 12: mod_base = OTHER; note = 2'-O-methyluridine-3'-phosphate
  modified_base 13: mod_base = OTHER; note = 2'-O-methyluridine-3'-phosphate
  modified_base 14: mod_base = OTHER; note = 2'-deoxy-2'-fluorouridine-3'-phosphate
  modified_base 15: mod_base = OTHER; note = 2'-O-methylguanosine-3'-phosphate
  modified_base 16: mod_base = OTHER; note = 2'-deoxy-2'-fluorouridine-3'-phosphate
  modified_base 17: mod_base = OTHER; note = 2'-O-methyladenosine-3'-phosphate
  modified_base 18: mod_base = OTHER; note = 2'-deoxy-2'-fluorocytidine-3'-phosphate
  modified_base 19: mod_base = OTHER; note = 2'-O-methyluridine-3'-phosphate
  modified_base 20: mod_base = OTHER; note = 2'-deoxy-2'-fluorouridine-3'-phosphate
  modified_base 21: mod_base = OTHER; note = 2'-O-methyladenosine-3'-phosphorothioate
  modified_base 22: mod_base = OTHER; note = 2'-O-methyluridine-3'-phosphorothioate
  modified_base 23: mod_base = OTHER; note = 2'-O-methylguanosine
tgctcttcagctttgtacttatg

SEQ ID NO: 536 - RNA, 23 nt, synthetic construct
  source 1..23: mol_type = other RNA
  modified_base 1: mod_base = OTHER; note = 2'-O-methyluridine-3'-phosphorothioate
  modified_base 2: mod_base = OTHER; note = 2'-deoxy-2'-fluorouridine-3'-phosphorothioate
  modified_base 3: mod_base = OTHER; note = 2'-O-methylguanosine-3'-phosphate
  modified_base 4: mod_base = OTHER; note = 2'-deoxy-2'-fluorocytidine-3'-phosphate
  modified_base 5: mod_base = OTHER; note = 2'-O-methyluridine-3'-phosphate
  modified_base 6: mod_base = OTHER; note = 2'-deoxy-2'-fluorocytidine-3'-phosphate
  modified_base 7: mod_base = OTHER; note = 2'-O-methyluridine-3'-phosphate
  modified_base 8: mod_base = OTHER; note = 2'-deoxy-2'-fluorouridine-3'-phosphate
  modified_base 9: mod_base = OTHER; note = 2'-O-methylcytidine-3'-phosphate
  modified_base 10: mod_base = OTHER; note = 2'-deoxy-2'-fluoroadenosine-3'-phosphate
  modified_base 11: mod_base = OTHER; note = 2'-O-methylguanosine-3'-phosphate
  modified_base 12: mod_base = OTHER; note = 2'-O-methylcytidine-3'-phosphate
  modified_base 13: mod_base = OTHER; note = 2'-O-methyluridine-3'-phosphate
  modified_base 14: mod_base = OTHER; note = 2'-deoxy-2'-fluorouridine-3'-phosphate
  modified_base 15: mod_base = OTHER; note = 2'-O-methyluridine-3'-phosphate
  modified_base 16: mod_base = OTHER; note = 2'-deoxy-2'-fluoroguanosine-3'-phosphate
  modified_base 17: mod_base = OTHER; note = 2'-O-methyluridine-3'-phosphate
  modified_base 18: mod_base = OTHER; note = 2'-deoxy-2'-fluoroadenosine-3'-phosphate
  modified_base 19: mod_base = OTHER; note = 2'-O-methylcytidine-3'-phosphate
  modified_base 20: mod_base = OTHER; note = 2'-deoxy-2'-fluorouridine-3'-phosphate
  modified_base 21: mod_base = OTHER; note = 2'-O-methyluridine-3'-phosphorothioate
  modified_base 22: mod_base = OTHER; note = 2'-O-methyladenosine-3'-phosphorothioate
  modified_base 23: mod_base = OTHER; note = 2'-O-methyluridine
ttgctcttcagctttgtacttat

SEQ ID NO: 537 - RNA, 23 nt, synthetic construct
  source 1..23: mol_type = other RNA
  modified_base 1: mod_base = OTHER; note = 2'-O-methyluridine-3'-phosphorothioate
  modified_base 2: mod_base = OTHER; note = 2'-deoxy-2'-fluorouridine-3'-phosphorothioate
  modified_base 3: mod_base = OTHER; note = 2'-O-methyluridine-3'-phosphate
  modified_base 4: mod_base = OTHER; note = 2'-deoxy-2'-fluoroguanosine-3'-phosphate
  modified_base 5: mod_base = OTHER; note = 2'-O-methyluridine-3'-phosphate
  modified_base 6: mod_base = OTHER; note = 2'-deoxy-2'-fluoroguanosine-3'-phosphate
  modified_base 7: mod_base = OTHER; note = 2'-O-methylguanosine-3'-phosphate
  modified_base 8: mod_base = OTHER; note = 2'-deoxy-2'-fluoroguanosine-3'-phosphate
  modified_base 9: mod_base = OTHER; note = 2'-O-methyluridine-3'-phosphate
  modified_base 10: mod_base = OTHER; note = 2'-deoxy-2'-fluoroadenosine-3'-phosphate
  modified_base 11: mod_base = OTHER; note = 2'-O-methylcytidine-3'-phosphate
  modified_base 12: mod_base = OTHER; note = 2'-O-methyladenosine-3'-phosphate
  modified_base 13: mod_base = OTHER; note = 2'-O-methyluridine-3'-phosphate
  modified_base 14: mod_base = OTHER; note = 2'-deoxy-2'-fluorouridine-3'-phosphate
  modified_base 15: mod_base = OTHER; note = 2'-O-methyluridine-3'-phosphate
  modified_base 16: mod_base = OTHER; note = 2'-deoxy-2'-fluoroguanosine-3'-phosphate
  modified_base 17: mod_base = OTHER; note = 2'-O-methyluridine-3'-phosphate
  modified_base 18: mod_base = OTHER; note = 2'-deoxy-2'-fluoroguanosine-3'-phosphate
  modified_base 19: mod_base = OTHER; note = 2'-O-methylguanosine-3'-phosphate
  modified_base 20: mod_base = OTHER; note = 2'-deoxy-2'-fluorouridine-3'-phosphate
  modified_base 21: mod_base = OTHER; note = 2'-O-methyladenosine-3'-phosphorothioate
  modified_base 22: mod_base = OTHER; note = 2'-O-methylcytidine-3'-phosphorothioate
  modified_base 23: mod_base = OTHER; note = 2'-O-methyladenosine
tttgtgggtacatttgtggtaca

SEQ ID NO: 538 - RNA, 23 nt, synthetic construct
  source 1..23: mol_type = other RNA
  modified_base 1: mod_base = OTHER; note = 2'-O-methyluridine-3'-phosphorothioate
  modified_base 2: mod_base = OTHER; note = 2'-deoxy-2'-fluorocytidine-3'-phosphorothioate
  modified_base 3: mod_base = OTHER; note = 2'-O-methylcytidine-3'-phosphate
  modified_base 4: mod_base = OTHER; note = 2'-deoxy-2'-fluorouridine-3'-phosphate
  modified_base 5: mod_base = OTHER; note = 2'-O-methyluridine-3'-phosphate
  modified_base 6: mod_base = OTHER; note = 2'-deoxy-2'-fluoroguanosine-3'-phosphate
  modified_base 7: mod_base = OTHER; note = 2'-O-methyluridine-3'-phosphate
  modified_base 8: mod_base = OTHER; note = 2'-deoxy-2'-fluoroguanosine-3'-phosphate
  modified_base 9: mod_base = OTHER; note = 2'-O-methylguanosine-3'-phosphate
  modified_base 10: mod_base = OTHER; note = 2'-deoxy-2'-fluoroguanosine-3'-phosphate
  modified_base 11: mod_base = OTHER; note = 2'-O-methyluridine-3'-phosphate
  modified_base 12: mod_base = OTHER; note = 2'-O-methyladenosine-3'-phosphate
  modified_base 13: mod_base = OTHER; note = 2'-O-methylcytidine-3'-phosphate
  modified_base 14: mod_base = OTHER; note = 2'-deoxy-2'-fluoroadenosine-3'-phosphate
  modified_base 15: mod_base = OTHER; note = 2'-O-methyluridine-3'-phosphate
  modified_base 16: mod_base = OTHER; note = 2'-deoxy-2'-fluorouridine-3'-phosphate
  modified_base 17: mod_base = OTHER; note = 2'-O-methyluridine-3'-phosphate
  modified_base 18: mod_base = OTHER; note = 2'-deoxy-2'-fluoroguanosine-3'-phosphate
  modified_base 19: mod_base = OTHER; note = 2'-O-methyluridine-3'-phosphate
  modified_base 20: mod_base = OTHER; note = 2'-deoxy-2'-fluoroguanosine-3'-phosphate
  modified_base 21: mod_base = OTHER; note = 2'-O-methylguanosine-3'-phosphorothioate
  modified_base 22: mod_base = OTHER; note = 2'-O-methyluridine-3'-phosphorothioate
  modified_base 23: mod_base = OTHER; note = 2'-O-methyladenosine
tccttgtgggtacatttgtggta

SEQ ID NO: 539 - RNA, 23 nt, synthetic construct
  source 1..23: mol_type = other RNA
  modified_base 1: mod_base = OTHER; note = 2'-O-methyluridine-3'-phosphorothioate
  modified_base 2: mod_base = OTHER; note = 2'-deoxy-2'-fluorouridine-3'-phosphorothioate
  modified_base 3: mod_base = OTHER; note = 2'-O-methyluridine-3'-phosphate
  modified_base 4: mod_base = OTHER; note = 2'-deoxy-2'-fluorocytidine-3'-phosphate
  modified_base 5: mod_base = OTHER; note = 2'-O-methyluridine-3'-phosphate
  modified_base 6: mod_base = OTHER; note = 2'-deoxy-2'-fluorouridine-3'-phosphate
  modified_base 7: mod_base = OTHER; note = 2'-O-methylguanosine-3'-phosphate
  modified_base 8: mod_base = OTHER; note = 2'-deoxy-2'-fluoroguanosine-3'-phosphate
  modified_base 9: mod_base = OTHER; note = 2'-O-methylguanosine-3'-phosphate
  modified_base 10: mod_base = OTHER; note = 2'-deoxy-2'-fluorocytidine-3'-phosphate
  modified_base 11: mod_base = OTHER; note = 2'-O-methyluridine-3'-phosphate
  modified_base 12: mod_base = OTHER; note = 2'-O-methylcytidine-3'-phosphate
  modified_base 13: mod_base = OTHER; note = 2'-O-methylcytidine-3'-phosphate
  modified_base 14: mod_base = OTHER; note = 2'-deoxy-2'-fluoroadenosine-3'-phosphate
  modified_base 15: mod_base = OTHER; note = 2'-O-methyladenosine-3'-phosphate
  modified_base 16: mod_base = OTHER; note = 2'-deoxy-2'-fluoroadenosine-3'-phosphate
  modified_base 17: mod_base = OTHER; note = 2'-O-methylcytidine-3'-phosphate
  modified_base 18: mod_base = OTHER; note = 2'-deoxy-2'-fluoroadenosine-3'-phosphate
  modified_base 19: mod_base = OTHER; note = 2'-O-methylguanosine-3'-phosphate
  modified_base 20: mod_base = OTHER; note = 2'-deoxy-2'-fluorouridine-3'-phosphate
  modified_base 21: mod_base = OTHER; note = 2'-O-methyladenosine-3'-phosphorothioate
  modified_base 22: mod_base = OTHER; note = 2'-O-methyluridine-3'-phosphorothioate
  modified_base 23: mod_base = OTHER; note = 2'-O-methylcytidine
tttcttgggctccaaacagtatc

SEQ ID NO: 540 - RNA, 23 nt, synthetic construct
  source 1..23: mol_type = other RNA
  modified_base 1: mod_base = OTHER; note = 2'-O-methyluridine-3'-phosphorothioate
  modified_base 2: mod_base = OTHER; note = 2'-deoxy-2'-fluorouridine-3'-phosphorothioate
  modified_base 3: mod_base = OTHER; note = 2'-O-methyluridine-3'-phosphate
  modified_base 4: mod_base = OTHER; note = 2'-deoxy-2'-fluorouridine-3'-phosphate
  modified_base 5: mod_base = OTHER; note = 2'-O-methylcytidine-3'-phosphate
  modified_base 6: mod_base = OTHER; note = 2'-deoxy-2'-fluorouridine-3'-phosphate
  modified_base 7: mod_base = OTHER; note = 2'-O-methyluridine-3'-phosphate
  modified_base 8: mod_base = OTHER; note = 2'-deoxy-2'-fluoroguanosine-3'-phosphate
  modified_base 9: mod_base = OTHER; note = 2'-O-methylguanosine-3'-phosphate
  modified_base 10: mod_base = OTHER; note = 2'-deoxy-2'-fluoroguanosine-3'-phosphate
  modified_base 11: mod_base = OTHER; note = 2'-O-methylcytidine-3'-phosphate
  modified_base 12: mod_base = OTHER; note = 2'-O-methyluridine-3'-phosphate
  modified_base 13: mod_base = OTHER; note = 2'-O-methylcytidine-3'-phosphate
  modified_base 14: mod_base = OTHER; note = 2'-deoxy-2'-fluorocytidine-3'-phosphate
  modified_base 15: mod_base = OTHER; note = 2'-O-methyladenosine-3'-phosphate
  modified_base 16: mod_base = OTHER; note = 2'-deoxy-2'-fluoroadenosine-3'-phosphate
  modified_base 17: mod_base = OTHER; note = 2'-O-methyladenosine-3'-phosphate
  modified_base 18: mod_base = OTHER; note = 2'-deoxy-2'-fluorocytidine-3'-phosphate
  modified_base 19: mod_base = OTHER; note = 2'-O-methyladenosine-3'-phosphate
  modified_base 20: mod_base = OTHER; note = 2'-deoxy-2'-fluoroguanosine-3'-phosphate
  modified_base 21: mod_base = OTHER; note = 2'-O-methyluridine-3'-phosphorothioate
  modified_base 22: mod_base = OTHER; note = 2'-O-methyladenosine-3'-phosphorothioate
  modified_base 23: mod_base = OTHER; note = 2'-O-methyluridine
ttttcttgggctccaaacagtat

SEQ ID NO: 541 - RNA, 23 nt, synthetic construct
  source 1..23: mol_type = other RNA
  modified_base 1: mod_base = OTHER; note = 2'-O-methyladenosine-3'-phosphorothioate
  modified_base 2: mod_base = OTHER; note = 2'-deoxy-2'-fluorocytidine-3'-phosphorothioate
  modified_base 3: mod_base = OTHER; note = 2'-O-methyluridine-3'-phosphate
  modified_base 4: mod_base = OTHER; note = 2'-deoxy-2'-fluorouridine-3'-phosphate
  modified_base 5: mod_base = OTHER; note = 2'-O-methyluridine-3'-phosphate
  modified_base 6: mod_base = OTHER; note = 2'-deoxy-2'-fluorocytidine-3'-phosphate
  modified_base 7: mod_base = OTHER; note = 2'-O-methyluridine-3'-phosphate
  modified_base 8: mod_base = OTHER; note = 2'-deoxy-2'-fluorouridine-3'-phosphate
  modified_base 9: mod_base = OTHER; note = 2'-O-methylguanosine-3'-phosphate
  modified_base 10: mod_base = OTHER; note = 2'-deoxy-2'-fluoroguanosine-3'-phosphate
  modified_base 11: mod_base = OTHER; note = 2'-O-methylguanosine-3'-phosphate
  modified_base 12: mod_base = OTHER; note = 2'-O-methylcytidine-3'-phosphate
  modified_base 13: mod_base = OTHER; note = 2'-O-methyluridine-3'-phosphate
  modified_base 14: mod_base = OTHER; note = 2'-deoxy-2'-fluorocytidine-3'-phosphate
  modified_base 15: mod_base = OTHER; note = 2'-O-methylcytidine-3'-phosphate
  modified_base 16: mod_base = OTHER; note = 2'-deoxy-2'-fluoroadenosine-3'-phosphate
  modified_base 17: mod_base = OTHER; note = 2'-O-methyladenosine-3'-phosphate
  modified_base 18: mod_base = OTHER; note = 2'-deoxy-2'-fluoroadenosine-3'-phosphate
  modified_base 19: mod_base = OTHER; note = 2'-O-methylcytidine-3'-phosphate
  modified_base 20: mod_base = OTHER; note = 2'-deoxy-2'-fluoroadenosine-3'-phosphate
  modified_base 21: mod_base = OTHER; note = 2'-O-methylguanosine-3'-phosphorothioate
  modified_base 22: mod_base = OTHER; note = 2'-O-methyluridine-3'-phosphorothioate
  modified_base 23: mod_base = OTHER; note = 2'-O-methyladenosine
actttcttgggctccaaacagta

SEQ ID NO: 542 - RNA, 23 nt, synthetic construct
  source 1..23: mol_type = other RNA
  modified_base 1: mod_base = OTHER; note = 2'-O-methyluridine-3'-phosphorothioate
  modified_base 2: mod_base = OTHER; note = 2'-deoxy-2'-fluorocytidine-3'-phosphorothioate
  modified_base 3: mod_base = OTHER; note = 2'-O-methyluridine-3'-phosphate
  modified_base 4: mod_base = OTHER; note = 2'-deoxy-2'-fluorouridine-3'-phosphate
  modified_base 5: mod_base = OTHER; note = 2'-O-methyluridine-3'-phosphate
  modified_base 6: mod_base = OTHER; note = 2'-deoxy-2'-fluorocytidine-3'-phosphate
  modified_base 7: mod_base = OTHER; note = 2'-O-methyladenosine-3'-phosphate
  modified_base 8: mod_base = OTHER; note = 2'-deoxy-2'-fluorocytidine-3'-phosphate
  modified_base 9: mod_base = OTHER; note = 2'-O-methyluridine-3'-phosphate
  modified_base 10: mod_base = OTHER; note = 2'-deoxy-2'-fluorouridine-3'-phosphate
  modified_base 11: mod_base = OTHER; note = 2'-O-methyluridine-3'-phosphate
  modified_base 12: mod_base = OTHER; note = 2'-O-methylcytidine-3'-phosphate
  modified_base 13: mod_base = OTHER; note = 2'-O-methyluridine-3'-phosphate
  modified_base 14: mod_base = OTHER; note = 2'-deoxy-2'-fluorouridine-3'-phosphate
  modified_base 15: mod_base = OTHER; note = 2'-O-methylguanosine-3'-phosphate
  modified_base 16: mod_base = OTHER; note = 2'-deoxy-2'-fluoroguanosine-3'-phosphate
  modified_base 17: mod_base = OTHER; note = 2'-O-methylguanosine-3'-phosphate
  modified_base 18: mod_base = OTHER; note = 2'-deoxy-2'-fluorocytidine-3'-phosphate
  modified_base 19: mod_base = OTHER; note = 2'-O-methyluridine-3'-phosphate
  modified_base 20: mod_base = OTHER; note = 2'-deoxy-2'-fluorocytidine-3'-phosphate
  modified_base 21: mod_base = OTHER; note = 2'-O-methylcytidine-3'-phosphorothioate
  modified_base 22: mod_base = OTHER; note = 2'-O-methyladenosine-3'-phosphorothioate
  modified_base 23: mod_base = OTHER; note = 2'-O-methyladenosine
tctttcactttcttgggctccaa

SEQ ID NO: 543 - RNA, 23 nt, synthetic construct
  source 1..23: mol_type = other RNA
  modified_base 1: mod_base = OTHER; note = 2'-O-methyluridine-3'-phosphorothioate
  modified_base 2: mod_base = OTHER; note = 2'-deoxy-2'-fluorouridine-3'-phosphorothioate
  modified_base 3: mod_base = OTHER; note = 2'-O-methylcytidine-3'-phosphate
  modified_base 4: mod_base = OTHER; note = 2'-deoxy-2'-fluorouridine-3'-phosphate
  modified_base 5: mod_base = OTHER; note = 2'-O-methyluridine-3'-phosphate
  modified_base 6: mod_base = OTHER; note = 2'-deoxy-2'-fluorouridine-3'-phosphate
  modified_base 7: mod_base = OTHER; note = 2'-O-methylcytidine-3'-phosphate
  modified_base 8: mod_base = OTHER; note = 2'-deoxy-2'-fluoroadenosine-3'-phosphate
  modified_base 9: mod_base = OTHER; note = 2'-O-methylcytidine-3'-phosphate
  modified_base 10: mod_base = OTHER; note = 2'-deoxy-2'-fluorouridine-3'-phosphate
  modified_base 11: mod_base = OTHER; note = 2'-O-methyluridine-3'-phosphate
  modified_base 12: mod_base = OTHER; note = 2'-O-methyluridine-3'-phosphate
  modified_base 13: mod_base = OTHER; note = 2'-O-methylcytidine-3'-phosphate
  modified_base 14: mod_base = OTHER; note = 2'-deoxy-2'-fluorouridine-3'-phosphate
  modified_base 15: mod_base = OTHER; note = 2'-O-methyluridine-3'-phosphate
  modified_base 16: mod_base = OTHER; note = 2'-deoxy-2'-fluoroguanosine-3'-phosphate
  modified_base 17: mod_base = OTHER; note = 2'-O-methylguanosine-3'-phosphate
  modified_base 18: mod_base = OTHER; note = 2'-deoxy-2'-fluoroguanosine-3'-phosphate
  modified_base 19: mod_base = OTHER; note = 2'-O-methylcytidine-3'-phosphate
  modified_base 20: mod_base = OTHER; note = 2'-deoxy-2'-fluorouridine-3'-phosphate
  modified_base 21: mod_base = OTHER; note = 2'-O-methylcytidine-3'-phosphorothioate
  modified_base 22: mod_base = OTHER; note = 2'-O-methylcytidine-3'-phosphorothioate
  modified_base 23: mod_base = OTHER; note = 2'-O-methyladenosine
ttctttcactttcttgggctcca

SEQ ID NO: 544 - RNA, 23 nt, synthetic construct
  source 1..23: mol_type = other RNA
  modified_base 1: mod_base = OTHER; note = 2'-O-methyluridine-3'-phosphorothioate
  modified_base 2: mod_base = OTHER; note = 2'-deoxy-2'-fluoroguanosine-3'-phosphorothioate
  modified_base 3: mod_base = OTHER; note = 2'-O-methyluridine-3'-phosphate
  modified_base 4: mod_base = OTHER; note = 2'-deoxy-2'-fluorocytidine-3'-phosphate
  modified_base 5: mod_base = OTHER; note = 2'-O-methyluridine-3'-phosphate
  modified_base 6: mod_base = OTHER; note = 2'-deoxy-2'-fluorouridine-3'-phosphate
  modified_base 7: mod_base = OTHER; note = 2'-O-methyluridine-3'-phosphate
  modified_base 8: mod_base = OTHER; note = 2'-deoxy-2'-fluorocytidine-3'-phosphate
  modified_base 9: mod_base = OTHER; note = 2'-O-methyladenosine-3'-phosphate
  modified_base 10: mod_base = OTHER; note = 2'-deoxy-2'-fluorocytidine-3'-phosphate
  modified_base 11: mod_base = OTHER; note = 2'-O-methyluridine-3'-phosphate
  modified_base 12: mod_base = OTHER; note = 2'-O-methyluridine-3'-phosphate
  modified_base 13: mod_base = OTHER; note = 2'-O-methyluridine-3'-phosphate
  modified_base 14: mod_base = OTHER; note = 2'-deoxy-2'-fluorocytidine-3'-phosphate
  modified_base 15: mod_base = OTHER; note = 2'-O-methyluridine-3'-phosphate
  modified_base 16: mod_base = OTHER; note = 2'-deoxy-2'-fluorouridine-3'-phosphate
  modified_base 17: mod_base = OTHER; note = 2'-O-methylguanosine-3'-phosphate
  modified_base 18: mod_base = OTHER; note = 2'-deoxy-2'-fluoroguanosine-3'-phosphate
  modified_base 19: mod_base = OTHER; note = 2'-O-methylguanosine-3'-phosphate
  modified_base 20: mod_base = OTHER; note = 2'-deoxy-2'-fluorocytidine-3'-phosphate
  modified_base 21: mod_base = OTHER; note = 2'-O-methyluridine-3'-phosphorothioate
  modified_base 22: mod_base = OTHER; note = 2'-O-methylcytidine-3'-phosphorothioate
  modified_base 23: mod_base = OTHER; note = 2'-O-methylcytidine
tgtctttcactttcttgggctcc

SEQ ID NO: 545 - RNA, 23 nt, synthetic construct
  source 1..23: mol_type = other RNA
  modified_base 1: mod_base = OTHER; note = 2'-O-methyluridine-3'-phosphorothioate
  modified_base 2: mod_base = OTHER; note = 2'-deoxy-2'-fluoroguanosine-3'-phosphorothioate
  modified_base 3: mod_base = OTHER; note = 2'-O-methylguanosine-3'-phosphate
  modified_base 4: mod_base = OTHER; note = 2'-deoxy-2'-fluorouridine-3'-phosphate
  modified_base 5: mod_base = OTHER; note = 2'-O-methylcytidine-3'-phosphate
  modified_base 6: mod_base = OTHER; note = 2'-deoxy-2'-fluorouridine-3'-phosphate
  modified_base 7: mod_base = OTHER; note = 2'-O-methyluridine-3'-phosphate
  modified_base 8: mod_base = OTHER; note = 2'-deoxy-2'-fluorouridine-3'-phosphate
  modified_base 9: mod_base = OTHER; note = 2'-O-methylcytidine-3'-phosphate
  modified_base 10: mod_base = OTHER; note = 2'-deoxy-2'-fluoroadenosine-3'-phosphate
  modified_base 11: mod_base = OTHER; note = 2'-O-methylcytidine-3'-phosphate
  modified_base 12: mod_base = OTHER; note = 2'-O-methyluridine-3'-phosphate
  modified_base 13: mod_base = OTHER; note = 2'-O-methyluridine-3'-phosphate
  modified_base 14: mod_base = OTHER; note = 2'-deoxy-2'-fluorouridine-3'-phosphate
  modified_base 15: mod_base = OTHER; note = 2'-O-methylcytidine-3'-phosphate
  modified_base 16: mod_base = OTHER; note = 2'-deoxy-2'-fluorouridine-3'-phosphate
  modified_base 17: mod_base = OTHER; note = 2'-O-methyluridine-3'-phosphate
  modified_base 18: mod_base = OTHER; note = 2'-deoxy-2'-fluoroguanosine-3'-phosphate
  modified_base 19: mod_base = OTHER; note = 2'-O-methylguanosine-3'-phosphate
  modified_base 20: mod_base = OTHER; note = 2'-deoxy-2'-fluoroguanosine-3'-phosphate
  modified_base 21: mod_base = OTHER; note = 2'-O-methylcytidine-3'-phosphorothioate
  modified_base 22: mod_base = OTHER; note = 2'-O-methyluridine-3'-phosphorothioate
  modified_base 23: mod_base = OTHER; note = 2'-O-methylcytidine
tggtctttcactttcttgggctc

SEQ ID NO: 546 - RNA, 23 nt, synthetic construct
  source 1..23: mol_type = other RNA
  modified_base 1: mod_base = OTHER; note = 2'-O-methyluridine-3'-phosphorothioate
  modified_base 2: mod_base = OTHER; note = 2'-deoxy-2'-fluorouridine-3'-phosphorothioate
  modified_base 3: mod_base = OTHER; note = 2'-O-methylguanosine-3'-phosphate
  modified_base 4: mod_base = OTHER; note = 2'-deoxy-2'-fluoroguanosine-3'-phosphate
  modified_base 5: mod_base = OTHER; note = 2'-O-methyluridine-3'-phosphate
  modified_base 6: mod_base = OTHER; note = 2'-deoxy-2'-fluorocytidine-3'-phosphate
  modified_base 7: mod_base = OTHER; note = 2'-O-methyluridine-3'-phosphate
  modified_base 8: mod_base = OTHER; note = 2'-deoxy-2'-fluorouridine-3'-phosphate
  modified_base 9: mod_base = OTHER; note = 2'-O-methyluridine-3'-phosphate
  modified_base 10: mod_base = OTHER; note = 2'-deoxy-2'-fluorocytidine-3'-phosphate
  modified_base 11: mod_base = OTHER; note = 2'-O-methyladenosine-3'-phosphate
  modified_base 12: mod_base = OTHER; note = 2'-O-methylcytidine-3'-phosphate
  modified_base 13: mod_base = OTHER; note = 2'-O-methyluridine-3'-phosphate
  modified_base 14: mod_base = OTHER; note = 2'-deoxy-2'-fluorouridine-3'-phosphate
  modified_base 15: mod_base = OTHER; note = 2'-O-methyluridine-3'-phosphate
  modified_base 16: mod_base = OTHER; note = 2'-deoxy-2'-fluorocytidine-3'-phosphate
  modified_base 17: mod_base = OTHER; note = 2'-O-methyluridine-3'-phosphate
  modified_base 18: mod_base = OTHER; note = 2'-deoxy-2'-fluorouridine-3'-phosphate
  modified_base 19: mod_base = OTHER; note = 2'-O-methylguanosine-3'-phosphate
  modified_base 20: mod_base = OTHER; note = 2'-deoxy-2'-fluoroguanosine-3'-phosphate
  modified_base 21: mod_base = OTHER; note = 2'-O-methylguanosine-3'-phosphorothioate
  modified_base 22: mod_base = OTHER; note = 2'-O-methylcytidine-3'-phosphorothioate
  modified_base 23: mod_base = OTHER; note = 2'-O-methyluridine
ttggtctttcactttcttgggct

SEQ ID NO: 547 - RNA, 23 nt, synthetic construct
  source 1..23: mol_type = other RNA
  modified_base 1: mod_base = OTHER; note = 2'-O-methyluridine-3'-phosphorothioate
  modified_base 2: mod_base = OTHER; note = 2'-deoxy-2'-fluoroadenosine-3'-phosphorothioate
  modified_base 3: mod_base = OTHER; note = 2'-O-methyladenosine-3'-phosphate
  modified_base 4: mod_base = OTHER; note = 2'-deoxy-2'-fluorouridine-3'-phosphate
  modified_base 5: mod_base = OTHER; note = 2'-O-methylguanosine-3'-phosphate
  modified_base 6: mod_base = OTHER; note = 2'-deoxy-2'-fluoroguanosine-3'-phosphate
  modified_base 7: mod_base = OTHER; note = 2'-O-methyluridine-3'-phosphate
  modified_base 8: mod_base = OTHER; note = 2'-deoxy-2'-fluorocytidine-3'-phosphate
  modified_base 9: mod_base = OTHER; note = 2'-O-methyluridine-3'-phosphate
  modified_base 10: mod_base = OTHER; note = 2'-deoxy-2'-fluorouridine-3'-phosphate
  modified_base 11: mod_base = OTHER; note = 2'-O-methyluridine-3'-phosphate
  modified_base 12: mod_base = OTHER; note = 2'-O-methylcytidine-3'-phosphate
  modified_base 13: mod_base = OTHER; note = 2'-O-methyladenosine-3'-phosphate
  modified_base 14: mod_base = OTHER; note = 2'-deoxy-2'-fluorocytidine-3'-phosphate
  modified_base 15: mod_base = OTHER; note = 2'-O-methyluridine-3'-phosphate
  modified_base 16: mod_base = OTHER; note = 2'-deoxy-2'-fluorouridine-3'-phosphate
  modified_base 17: mod_base = OTHER; note = 2'-O-methyluridine-3'-phosphate
  modified_base 18: mod_base = OTHER; note = 2'-deoxy-2'-fluorocytidine-3'-phosphate
  modified_base 19: mod_base = OTHER; note = 2'-O-methyluridine-3'-phosphate
  modified_base 20: mod_base = OTHER; note = 2'-deoxy-2'-fluorouridine-3'-phosphate
  modified_base 21: mod_base = OTHER; note = 2'-O-methylguanosine-3'-phosphorothioate
  modified_base 22: mod_base = OTHER; note = 2'-O-methylguanosine-3'-phosphorothioate
  modified_base 23: mod_base = OTHER; note = 2'-O-methylguanosine
taatggtctttcactttcttggg

SEQ ID NO: 548 - RNA, 23 nt, synthetic construct
  source 1..23: mol_type = other RNA
  modified_base 1: mod_base = OTHER; note = 2'-O-methyluridine-3'-phosphorothioate
  modified_base 2: mod_base = OTHER; note = 2'-deoxy-2'-fluorouridine-3'-phosphorothioate
  modified_base 3: mod_base = OTHER; note = 2'-O-methylguanosine-3'-phosphate
  modified_base 4: mod_base = OTHER; note = 2'-deoxy-2'-fluorocytidine-3'-phosphate
  modified_base 5: mod_base = OTHER; note = 2'-O-methyladenosine-3'-phosphate
  modified_base 6: mod_base = OTHER; note = 2'-deoxy-2'-fluoroadenosine-3'-phosphate
  modified_base 7: mod_base = OTHER; note = 2'-O-methyluridine-3'-phosphate
  modified_base 8: mod_base = OTHER; note = 2'-deoxy-2'-fluoroguanosine-3'-phosphate
  modified_base 9: mod_base = OTHER; note = 2'-O-methylguanosine-3'-phosphate
  modified_base 10: mod_base = OTHER; note = 2'-deoxy-2'-fluorouridine-3'-phosphate
  modified_base 11: mod_base = OTHER; note = 2'-O-methylcytidine-3'-phosphate
  modified_base 12: mod_base = OTHER; note = 2'-O-methyluridine-3'-phosphate
  modified_base 13: mod_base = OTHER; note = 2'-O-methyluridine-3'-phosphate
  modified_base 14: mod_base = OTHER; note = 2'-deoxy-2'-fluorouridine-3'-phosphate
  modified_base 15: mod_base = OTHER; note = 2'-O-methylcytidine-3'-phosphate
  modified_base 16: mod_base = OTHER; note = 2'-deoxy-2'-fluoroadenosine-3'-phosphate
  modified_base 17: mod_base = OTHER; note = 2'-O-methylcytidine-3'-phosphate
  modified_base 18: mod_base = OTHER; note = 2'-deoxy-2'-fluorouridine-3'-phosphate
  modified_base 19: mod_base = OTHER; note = 2'-O-methyluridine-3'-phosphate
  modified_base 20: mod_base = OTHER; note = 2'-deoxy-2'-fluorouridine-3'-phosphate
  modified_base 21: mod_base = OTHER; note = 2'-O-methylcytidine-3'-phosphorothioate
  modified_base 22: mod_base = OTHER; note = 2'-O-methyluridine-3'-phosphorothioate
  modified_base 23: mod_base = OTHER; note = 2'-O-methyluridine
ttgcaatggtctttcactttctt

SEQ ID NO: 549 - RNA, 23 nt, synthetic construct
  source 1..23: mol_type = other RNA
  modified_base 1: mod_base = OTHER; note = 2'-O-methyluridine-3'-phosphorothioate
  modified_base 2: mod_base = OTHER; note = 2'-deoxy-2'-fluorocytidine-3'-phosphorothioate
  modified_base 3: mod_base = OTHER; note = 2'-O-methyluridine-3'-phosphate
  modified_base 4: mod_base = OTHER; note = 2'-deoxy-2'-fluoroguanosine-3'-phosphate
  modified_base 5: mod_base = OTHER; note = 2'-O-methylcytidine-3'-phosphate
  modified_base 6: mod_base = OTHER; note = 2'-deoxy-2'-fluoroadenosine-3'-phosphate
  modified_base 7: mod_base = OTHER; note = 2'-O-methyladenosine-3'-phosphate
  modified_base 8: mod_base = OTHER; note = 2'-deoxy-2'-fluorouridine-3'-phosphate
  modified_base 9: mod_base = OTHER; note = 2'-O-methylguanosine-3'-phosphate
  modified_base 10: mod_base = OTHER; note = 2'-deoxy-2'-fluoroguanosine-3'-phosphate
  modified_base 11: mod_base = OTHER; note = 2'-O-methyluridine-3'-phosphate
  modified_base 12: mod_base = OTHER; note = 2'-O-methylcytidine-3'-phosphate
  modified_base 13: mod_base = OTHER; note = 2'-O-methyluridine-3'-phosphate
  modified_base 14: mod_base = OTHER; note = 2'-deoxy-2'-fluorouridine-3'-phosphate
  modified_base 15: mod_base = OTHER; note = 2'-O-methyluridine-3'-phosphate
  modified_base 16: mod_base = OTHER; note = 2'-deoxy-2'-fluorocytidine-3'-phosphate
  modified_base 17: mod_base = OTHER; note = 2'-O-methyladenosine-3'-phosphate
  modified_base 18: mod_base = OTHER; note = 2'-deoxy-2'-fluorocytidine-3'-phosphate
  modified_base 19: mod_base = OTHER; note = 2'-O-methyluridine-3'-phosphate
  modified_base 20: mod_base = OTHER; note = 2'-deoxy-2'-fluorouridine-3'-phosphate
  modified_base 21: mod_base = OTHER; note = 2'-O-methyluridine-3'-phosphorothioate
  modified_base 22: mod_base = OTHER; note = 2'-O-methylcytidine-3'-phosphorothioate
  modified_base 23: mod_base = OTHER; note = 2'-O-methyluridine
tctgcaatggtctttcactttct

SEQ ID NO: 550 - RNA, 23 nt, synthetic construct
  source 1..23: mol_type = other RNA
  modified_base 1: mod_base = OTHER; note = 2'-O-methyluridine-3'-phosphorothioate
  modified_base 2: mod_base = OTHER; note = 2'-deoxy-2'-fluorocytidine-3'-phosphorothioate
  modified_base 3: mod_base = OTHER; note = 2'-O-methyluridine-3'-phosphate
  modified_base 4: mod_base = OTHER; note = 2'-deoxy-2'-fluoroguanosine-3'-phosphate
  modified_base 5: mod_base = OTHER; note = 2'-O-methylguanosine-3'-phosphate
  modified_base 6: mod_base = OTHER; note = 2'-deoxy-2'-fluorocytidine-3'-phosphate
  modified_base 7: mod_base = OTHER; note = 2'-O-methyladenosine-3'-phosphate
  modified_base 8: mod_base = OTHER; note = 2'-deoxy-2'-fluoroguanosine-3'-phosphate
  modified_base 9: mod_base = OTHER; note = 2'-O-methyluridine-3'-phosphate
  modified_base 10: mod_base = OTHER; note = 2'-deoxy-2'-fluoroguanosine-3'-phosphate
  modified_base 11: mod_base = OTHER; note = 2'-O-methylguanosine-3'-phosphate
  modified_base 12: mod_base = OTHER; note = 2'-O-methyluridine-3'-phosphate
  modified_base 13: mod_base = OTHER; note = 2'-O-methyluridine-3'-phosphate
  modified_base 14: mod_base = OTHER; note = 2'-deoxy-2'-fluorouridine-3'-phosphate
  modified_base 15: mod_base = OTHER; note = 2'-O-methylcytidine-3'-phosphate
  modified_base 16: mod_base = OTHER; note = 2'-deoxy-2'-fluorocytidine-3'-phosphate
  modified_base 17: mod_base = OTHER; note = 2'-O-methyladenosine-3'-phosphate
  modified_base 18: mod_base = OTHER; note = 2'-deoxy-2'-fluoroguanosine-3'-phosphate
  modified_base 19: mod_base = OTHER; note = 2'-O-methyluridine-3'-phosphate
  modified_base 20: mod_base = OTHER; note = 2'-deoxy-2'-fluoroguanosine-3'-phosphate
  modified_base 21: mod_base = OTHER; note = 2'-O-methyladenosine-3'-phosphorothioate
  modified_base 22: mod_base = OTHER; note = 2'-O-methylguanosine-3'-phosphorothioate
  modified_base 23: mod_base = OTHER; note = 2'-O-methylguanosine
tctggcagtggtttccagtgagg

SEQ ID NO: 551 - RNA, 23 nt, synthetic construct
  source 1..23: mol_type = other RNA
  modified_base 1: mod_base = OTHER; note = 2'-O-methyladenosine-3'-phosphorothioate
  modified_base 2: mod_base = OTHER; note = 2'-deoxy-2'-fluoroguanosine-3'-phosphorothioate
  modified_base 3: mod_base = OTHER; note = 2'-O-methylcytidine-3'-phosphate
  modified_base 4: mod_base = OTHER; note = 2'-deoxy-2'-fluoroadenosine-3'-phosphate
  modified_base 5: mod_base = OTHER; note = 2'-O-methylcytidine-3'-phosphate
  modified_base 6: mod_base = OTHER; note = 2'-deoxy-2'-fluorouridine-3'-phosphate
  modified_base 7: mod_base = OTHER; note = 2'-O-methyluridine-3'-phosphate
  modified_base 8: mod_base = OTHER; note = 2'-deoxy-2'-fluorocytidine-3'-phosphate
  modified_base 9: mod_base = OTHER; note = 2'-O-methyluridine-3'-phosphate
  modified_base 10: mod_base = OTHER; note = 2'-deoxy-2'-fluorocytidine-3'-phosphate
  modified_base 11: mod_base = OTHER; note = 2'-O-methyluridine-3'-phosphate
  modified_base 12: mod_base = OTHER; note = 2'-O-methyluridine-3'-phosphate
  modified_base 13: mod_base = OTHER; note = 2'-O-methyluridine-3'-phosphate
  modified_base 14: mod_base = OTHER; note = 2'-deoxy-2'-fluorocytidine-3'-phosphate
  modified_base 15: mod_base = OTHER; note = 2'-O-methyluridine-3'-phosphate
  modified_base 16: mod_base = OTHER; note = 2'-deoxy-2'-fluoroguanosine-3'-phosphate
  modified_base 17: mod_base = OTHER; note = 2'-O-methylguanosine-3'-phosphate
  modified_base 18: mod_base = OTHER; note = 2'-deoxy-2'-fluorocytidine-3'-phosphate
  modified_base 19: mod_base = OTHER; note = 2'-O-methyladenosine-3'-phosphate
  modified_base 20: mod_base = OTHER; note = 2'-deoxy-2'-fluoroguanosine-3'-phosphate
  modified_base 21: mod_base = OTHER; note = 2'-O-methyluridine-3'-phosphorothioate
  modified_base 22: mod_base = OTHER; note = 2'-O-methylguanosine-3'-phosphorothioate
  modified_base 23: mod_base = OTHER; note = 2'-O-methylguanosine
agcacttctctttctggcagtgg

SEQ ID NO: 552 - RNA, 23 nt, synthetic construct
  source 1..23: mol_type = other RNA
  modified_base 1: mod_base = OTHER; note = 2'-O-methyladenosine-3'-phosphorothioate
  modified_base 2: mod_base = OTHER; note = 2'-deoxy-2'-fluoroadenosine-3'-phosphorothioate
  modified_base 3: mod_base = OTHER; note = 2'-O-methylguanosine-3'-phosphate
  modified_base 4: mod_base = OTHER; note = 2'-deoxy-2'-fluorocytidine-3'-phosphate
  modified_base 5: mod_base = OTHER; note = 2'-O-methyladenosine-3'-phosphate
  modified_base 6: mod_base = OTHER; note = 2'-deoxy-2'-fluorocytidine-3'-phosphate
  modified_base 7: mod_base = OTHER; note = 2'-O-methyluridine-3'-phosphate
  modified_base 8: mod_base = OTHER; note = 2'-deoxy-2'-fluorouridine-3'-phosphate
  modified_base 9: mod_base = OTHER; note = 2'-O-methylcytidine-3'-phosphate
  modified_base 10: mod_base = OTHER; note = 2'-deoxy-2'-fluorouridine-3'-phosphate
  modified_base 11: mod_base = OTHER; note = 2'-O-methylcytidine-3'-phosphate
  modified_base 12: mod_base = OTHER; note = 2'-O-methyluridine-3'-phosphate
  modified_base 13: mod_base = OTHER; note = 2'-O-methyluridine-3'-phosphate
  modified_base 14: mod_base = OTHER; note = 2'-deoxy-2'-fluorouridine-3'-phosphate
  modified_base 15: mod_base = OTHER; note = 2'-O-methylcytidine-3'-phosphate
  modified_base 16: mod_base = OTHER; note = 2'-deoxy-2'-fluorouridine-3'-phosphate
  modified_base 17: mod_base = OTHER; note = 2'-O-methylguanosine-3'-phosphate
  modified_base 18: mod_base = OTHER; note = 2'-deoxy-2'-fluoroguanosine-3'-phosphate
  modified_base 19: mod_base = OTHER; note = 2'-O-methylcytidine-3'-phosphate
  modified_base 20: mod_base = OTHER; note = 2'-deoxy-2'-fluoroadenosine-3'-phosphate
  modified_base 21: mod_base = OTHER; note = 2'-O-methylguanosine-3'-phosphorothioate
  modified_base 22: mod_base = OTHER; note = 2'-O-methyluridine-3'-phosphorothioate
  modified_base 23: mod_base = OTHER; note = 2'-O-methylguanosine
aagcacttctctttctggcagtg

SEQ ID NO: 553 - RNA, 23 nt, synthetic construct
  source 1..23: mol_type = other RNA
  modified_base 1: mod_base = OTHER; note = 2'-O-methyluridine-3'-phosphorothioate
  modified_base 2: mod_base = OTHER; note = 2'-deoxy-2'-fluorouridine-3'-phosphorothioate
  modified_base 3: mod_base = OTHER; note = 2'-O-methylcytidine-3'-phosphate
  modified_base 4: mod_base = OTHER; note = 2'-deoxy-2'-fluoroadenosine-3'-phosphate
  modified_base 5: mod_base = OTHER; note = 2'-O-methyladenosine-3'-phosphate
  modified_base 6: mod_base = OTHER; note = 2'-deoxy-2'-fluoroadenosine-3'-phosphate
  modified_base 7: mod_base = OTHER; note = 2'-O-methylguanosine-3'-phosphate
  modified_base 8: mod_base = OTHER; note = 2'-deoxy-2'-fluorocytidine-3'-phosphate
  modified_base 9: mod_base = OTHER; note = 2'-O-methyladenosine-3'-phosphate
  modified_base 10: mod_base = OTHER; note = 2'-deoxy-2'-fluorocytidine-3'-phosphate
  modified_base 11: mod_base = OTHER; note = 2'-O-methyluridine-3'-phosphate
  modified_base 12: mod_base = OTHER; note = 2'-O-methyluridine-3'-phosphate
  modified_base 13: mod_base = OTHER; note = 2'-O-methylcytidine-3'-phosphate
  modified_base 14: mod_base = OTHER; note = 2'-deoxy-2'-fluorouridine-3'-phosphate
  modified_base 15: mod_base = OTHER; note = 2'-O-methylcytidine-3'-phosphate
  modified_base 16: mod_base = OTHER; note = 2'-deoxy-2'-fluorouridine-3'-phosphate
  modified_base 17: mod_base = OTHER; note = 2'-O-methyluridine-3'-phosphate
  modified_base 18: mod_base = OTHER; note = 2'-deoxy-2'-fluorouridine-3'-phosphate
  modified_base 19: mod_base = OTHER; note = 2'-O-methylcytidine-3'-phosphate
  modified_base 20: mod_base = OTHER; note = 2'-deoxy-2'-fluorouridine-3'-phosphate
  modified_base 21: mod_base = OTHER; note = 2'-O-methylguanosine-3'-phosphorothioate
  modified_base 22: mod_base = OTHER; note = 2'-O-methylguanosine-3'-phosphorothioate
  modified_base 23: mod_base = OTHER; note = 2'-O-methylcytidine
ttcaaagcacttctctttctggc

SEQ ID NO: 554 - RNA, 23 nt, synthetic construct
  source 1..23: mol_type = other RNA
  modified_base 1: mod_base = OTHER; note = 2'-O-methyluridine-3'-phosphorothioate
  modified_base 2: mod_base = OTHER; note = 2'-deoxy-2'-fluorocytidine-3'-phosphorothioate
  modified_base 3: mod_base = OTHER; note = 2'-O-methyluridine-3'-phosphate
  modified_base 4: mod_base = OTHER; note = 2'-deoxy-2'-fluorocytidine-3'-phosphate
  modified_base 5: mod_base = OTHER; note = 2'-O-methyladenosine-3'-phosphate
  modified_base 6: mod_base = OTHER; note = 2'-deoxy-2'-fluoroadenosine-3'-phosphate
  modified_base 7: mod_base = OTHER; note = 2'-O-methyladenosine-3'-phosphate
  modified_base 8: mod_base = OTHER; note = 2'-deoxy-2'-fluoroguanosine-3'-phosphate
  modified_base 9: mod_base = OTHER; note = 2'-O-methylcytidine-3'-phosphate
  modified_base 10: mod_base = OTHER; note = 2'-deoxy-2'-fluoroadenosine-3'-phosphate
  modified_base 11: mod_base = OTHER; note = 2'-O-methylcytidine-3'-phosphate
  modified_base 12: mod_base = OTHER; note = 2'-O-methyluridine-3'-phosphate
  modified_base 13: mod_base = OTHER; note = 2'-O-methyluridine-3'-phosphate
  modified_base 14: mod_base = OTHER; note = 2'-deoxy-2'-fluorocytidine-3'-phosphate
  modified_base 15: mod_base = OTHER; note = 2'-O-methyluridine-3'-phosphate
  modified_base 16: mod_base = OTHER; note = 2'-deoxy-2'-fluorocytidine-3'-phosphate
  modified_base 17: mod_base = OTHER; note = 2'-O-methyluridine-3'-phosphate
  modified_base 18: mod_base = OTHER; note = 2'-deoxy-2'-fluorouridine-3'-phosphate
  modified_base 19: mod_base = OTHER; note = 2'-O-methyluridine-3'-phosphate
  modified_base 20: mod_base = OTHER; note = 2'-deoxy-2'-fluorocytidine-3'-phosphate
  modified_base 21: mod_base = OTHER; note = 2'-O-methyluridine-3'-phosphorothioate
  modified_base 22: mod_base = OTHER; note = 2'-O-methylguanosine-3'-phosphorothioate
  modified_base 23: mod_base = OTHER; note = 2'-O-methylguanosine
tctcaaagcacttctctttctgg

SEQ ID NO: 555 - RNA, 23 nt, synthetic construct
  source 1..23: mol_type = other RNA
  modified_base 1: mod_base = OTHER; note = 2'-O-methyluridine-3'-phosphorothioate
  modified_base 2: mod_base = OTHER; note = 2'-deoxy-2'-fluoroadenosine-3'-phosphorothioate
  modified_base 3: mod_base = OTHER; note = 2'-O-methyladenosine-3'-phosphate
  modified_base 4: mod_base = OTHER; note = 2'-deoxy-2'-fluoroguanosine-3'-phosphate
  modified_base 5: mod_base = OTHER; note = 2'-O-methylcytidine-3'-phosphate
  modified_base 6: mod_base = OTHER; note = 2'-deoxy-2'-fluorouridine-3'-phosphate
  modified_base 7: mod_base = OTHER; note = 2'-O-methylguanosine-3'-phosphate
  modified_base 8: mod_base = OTHER; note = 2'-deoxy-2'-fluoroadenosine-3'-phosphate
  modified_base 9: mod_base = OTHER; note = 2'-O-methylguanosine-3'-phosphate
  modified_base 10: mod_base = OTHER; note = 2'-deoxy-2'-fluoroguanosine-3'-phosphate
  modified_base 11: mod_base = OTHER; note = 2'-O-methylcytidine-3'-phosphate
  modified_base 12: mod_base = OTHER; note = 2'-O-methyluridine-3'-phosphate
  modified_base 13: mod_base = OTHER; note = 2'-O-methylcytidine-3'-phosphate
  modified_base 14: mod_base = OTHER; note = 2'-deoxy-2'-fluoroadenosine-3'-phosphate
  modified_base 15: mod_base = OTHER; note = 2'-O-methyladenosine-3'-phosphate
  modified_base 16: mod_base = OTHER; note = 2'-deoxy-2'-fluoroadenosine-3'-phosphate
  modified_base 17: mod_base = OTHER; note = 2'-O-methylguanosine-3'-phosphate
  modified_base 18: mod_base = OTHER; note = 2'-deoxy-2'-fluorocytidine-3'-phosphate
  modified_base 19: mod_base = OTHER; note = 2'-O-methyladenosine-3'-phosphate
  modified_base 20: mod_base = OTHER; note = 2'-deoxy-2'-fluorocytidine-3'-phosphate
  modified_base 21: mod_base = OTHER; note = 2'-O-methyluridine-3'-phosphorothioate
  modified_base 22: mod_base = OTHER; note = 2'-O-methyluridine-3'-phosphorothioate
  modified_base 23: mod_base = OTHER; note = 2'-O-methylcytidine
taagctgaggctcaaagcacttc

SEQ ID NO: 556 - RNA, 23 nt, synthetic construct
  source 1..23: mol_type = other RNA
  modified_base 1: mod_base = OTHER; note = 2'-O-methyluridine-3'-phosphorothioate
  modified_base 2: mod_base = OTHER; note = 2'-deoxy-2'-fluorocytidine-3'-phosphorothioate
  modified_base 3: mod_base = OTHER; note = 2'-O-methyladenosine-3'-phosphate
  modified_base 4: mod_base = OTHER; note = 2'-deoxy-2'-fluorouridine-3'-phosphate
  modified_base 5: mod_base = OTHER; note = 2'-O-methyladenosine-3'-phosphate
  modified_base 6: mod_base = OTHER; note = 2'-deoxy-2'-fluorouridine-3'-phosphate
  modified_base 7: mod_base = OTHER; note = 2'-O-methylcytidine-3'-phosphate
  modified_base 8: mod_base = OTHER; note = 2'-deoxy-2'-fluorouridine-3'-phosphate
  modified_base 9: mod_base = OTHER; note = 2'-O-methylcytidine-3'-phosphate
  modified_base 10: mod_base = OTHER; note = 2'-deoxy-2'-fluoroadenosine-3'-phosphate
  modified_base 11: mod_base = OTHER; note = 2'-O-methyluridine-3'-phosphate
  modified_base 12: mod_base = OTHER; note = 2'-O-methyluridine-3'-phosphate
  modified_base 13: mod_base = OTHER; note = 2'-O-methylcytidine-3'-phosphate
  modified_base 14: mod_base = OTHER; note = 2'-deoxy-2'-fluorouridine-3'-phosphate
  modified_base 15: mod_base = OTHER; note = 2'-O-methyluridine-3'-phosphate
  modified_base 16: mod_base = OTHER; note = 2'-deoxy-2'-fluoroguanosine-3'-phosphate
  modified_base 17: mod_base = OTHER; note = 2'-O-methyluridine-3'-phosphate
  modified_base 18: mod_base = OTHER; note = 2'-deoxy-2'-fluoroguanosine-3'-phosphate
  modified_base 19: mod_base = OTHER; note = 2'-O-methylguanosine-3'-phosphate
  modified_base 20: mod_base = OTHER; note = 2'-deoxy-2'-fluoroadenosine-3'-phosphate
  modified_base 21: mod_base = OTHER; note = 2'-O-methyladenosine-3'-phosphorothioate
  modified_base 22: mod_base = OTHER; note = 2'-O-methyladenosine-3'-phosphorothioate
  modified_base 23: mod_base = OTHER; note = 2'-O-methyladenosine
tcatatctcattcttgtggaaaa

SEQ ID NO: 557 - RNA, 23 nt, synthetic construct
  source 1..23: mol_type = other RNA
  modified_base 1: mod_base = OTHER; note = 2'-O-methyladenosine-3'-phosphorothioate
  modified_base 2: mod_base = OTHER; note = 2'-deoxy-2'-fluorocytidine-3'-phosphorothioate
  modified_base 3: mod_base = OTHER; note = 2'-O-methylcytidine-3'-phosphate
  modified_base 4: mod_base = OTHER; note = 2'-deoxy-2'-fluoroadenosine-3'-phosphate
  modified_base 5: mod_base = OTHER; note = 2'-O-methyluridine-3'-phosphate
  modified_base 6: mod_base = OTHER; note = 2'-deoxy-2'-fluoroadenosine-3'-phosphate
  modified_base 7: mod_base = OTHER; note = 2'-O-methyluridine-3'-phosphate
  modified_base 8: mod_base = OTHER; note = 2'-deoxy-2'-fluorocytidine-3'-phosphate
  modified_base 9: mod_base = OTHER; note = 2'-O-methyluridine-3'-phosphate
  modified_base 10: mod_base = OTHER; note = 2'-deoxy-2'-fluorocytidine-3'-phosphate
  modified_base 11: mod_base = OTHER; note = 2'-O-methyladenosine-3'-phosphate
  modified_base 12: mod_base = OTHER; note = 2'-O-methyluridine-3'-phosphate
  modified_base 13: mod_base = OTHER; note = 2'-O-methyluridine-3'-phosphate
  modified_base 14: mod_base = OTHER; note = 2'-deoxy-2'-fluorocytidine-3'-phosphate
  modified_base 15: mod_base = OTHER; note = 2'-O-methyluridine-3'-phosphate
  modified_base 16: mod_base = OTHER; note = 2'-deoxy-2'-fluorouridine-3'-phosphate
  modified_base 17: mod_base = OTHER; note = 2'-O-methylguanosine-3'-phosphate
  modified_base 18: mod_base = OTHER; note = 2'-deoxy-2'-fluorouridine-3'-phosphate
  modified_base 19: mod_base = OTHER; note = 2'-O-methylguanosine-3'-phosphate
  modified_base 20: mod_base = OTHER; note = 2'-deoxy-2'-fluoroguanosine-3'-phosphate
  modified_base 21: mod_base = OTHER; note = 2'-O-methyladenosine-3'-phosphorothioate
  modified_base 22: mod_base = OTHER; note = 2'-O-methyladenosine-3'-phosphorothioate
  modified_base 23: mod_base = OTHER; note = 2'-O-methyladenosine
accatatctcattcttgtggaaa

SEQ ID NO: 558 - RNA, 23 nt, synthetic construct
  source 1..23: mol_type = other RNA
  modified_base 1: mod_base = OTHER; note = 2'-O-methyluridine-3'-phosphorothioate
  modified_base 2: mod_base = OTHER; note = 2'-deoxy-2'-fluoroadenosine-3'-phosphorothioate
  modified_base 3: mod_base = OTHER; note = 2'-O-methylcytidine-3'-phosphate
  modified_base 4: mod_base = OTHER; note = 2'-deoxy-2'-fluorocytidine-3'-phosphate
  modified_base 5: mod_base = OTHER; note = 2'-O-methyladenosine-3'-phosphate
  modified_base 6: mod_base = OTHER; note = 2'-deoxy-2'-fluorouridine-3'-phosphate
  modified_base 7: mod_base = OTHER; note = 2'-O-methyladenosine-3'-phosphate
  modified_base 8: mod_base = OTHER; note = 2'-deoxy-2'-fluorouridine-3'-phosphate
  modified_base 9: mod_base = OTHER; note = 2'-O-methylcytidine-3'-phosphate
  modified_base 10: mod_base = OTHER; note = 2'-deoxy-2'-fluorouridine-3'-phosphate
  modified_base 11: mod_base = OTHER; note = 2'-O-methylcytidine-3'-phosphate
  modified_base 12: mod_base = OTHER; note = 2'-O-methyladenosine-3'-phosphate
  modified_base 13: mod_base = OTHER; note = 2'-O-methyluridine-3'-phosphate
  modified_base 14: mod_base = OTHER; note = 2'-deoxy-2'-fluorouridine-3'-phosphate
  modified_base 15: mod_base = OTHER; note = 2'-O-methylcytidine-3'-phosphate
  modified_base 16: mod_base = OTHER; note = 2'-deoxy-2'-fluorouridine-3'-phosphate
  modified_base 17: mod_base = OTHER; note = 2'-O-methyluridine-3'-phosphate
  modified_base 18: mod_base = OTHER; note = 2'-deoxy-2'-fluoroguanosine-3'-phosphate
  modified_base 19: mod_base = OTHER; note = 2'-O-methyluridine-3'-phosphate
  modified_base 20: mod_base = OTHER; note = 2'-deoxy-2'-fluoroguanosine-3'-phosphate
  modified_base 21: mod_base = OTHER; note = 2'-O-methylguanosine-3'-phosphorothioate
  modified_base 22: mod_base = OTHER; note = 2'-O-methyladenosine-3'-phosphorothioate
  modified_base 23: mod_base = OTHER; note = 2'-O-methyladenosine
taccatatctcattcttgtggaa

SEQ ID NO: 559 - RNA, 23 nt, synthetic construct
  source 1..23: mol_type = other RNA
  modified_base 1: mod_base = OTHER; note = 2'-O-methyluridine-3'-phosphorothioate
  modified_base 2: mod_base = OTHER; note = 2'-deoxy-2'-fluorocytidine-3'-phosphorothioate
  modified_base 3: mod_base = OTHER; note = 2'-O-methyluridine-3'-phosphate
  modified_base 4: mod_base = OTHER; note = 2'-deoxy-2'-fluoroadenosine-3'-phosphate
  modified_base 5: mod_base = OTHER; note = 2'-O-methyluridine-3'-phosphate
  modified_base 6: mod_base = OTHER; note = 2'-deoxy-2'-fluoroadenosine-3'-phosphate
  modified_base 7: mod_base = OTHER; note = 2'-O-methylcytidine-3'-phosphate
  modified_base 8: mod_base = OTHER; note = 2'-deoxy-2'-fluorocytidine-3'-phosphate
  modified_base 9: mod_base = OTHER; note = 2'-O-methyladenosine-3'-phosphate
  modified_base 10: mod_base = OTHER; note = 2'-deoxy-2'-fluorouridine-3'-phosphate
  modified_base 11: mod_base = OTHER; note = 2'-O-methyladenosine-3'-phosphate
  modified_base 12: mod_base = OTHER; note = 2'-O-methyluridine-3'-phosphate
  modified_base 13: mod_base = OTHER; note = 2'-O-methylcytidine-3'-phosphate
  modified_base 14: mod_base = OTHER; note = 2'-deoxy-2'-fluorouridine-3'-phosphate
  modified_base 15: mod_base = OTHER; note = 2'-O-methylcytidine-3'-phosphate
  modified_base 16: mod_base = OTHER; note = 2'-deoxy-2'-fluoroadenosine-3'-phosphate
  modified_base 17: mod_base = OTHER; note = 2'-O-methyluridine-3'-phosphate
  modified_base 18: mod_base = OTHER; note = 2'-deoxy-2'-fluorouridine-3'-phosphate
  modified_base 19: mod_base = OTHER; note = 2'-O-methylcytidine-3'-phosphate
  modified_base 20: mod_base = OTHER; note = 2'-deoxy-2'-fluorouridine-3'-phosphate
  modified_base 21: mod_base = OTHER; note = 2'-O-methyluridine-3'-phosphorothioate
  modified_base 22: mod_base = OTHER; note = 2'-O-methylguanosine-3'-phosphorothioate
  modified_base 23: mod_base = OTHER; note = 2'-O-methyluridine
tctataccatatctcattcttgt

SEQ ID NO: 560 - RNA, 23 nt, synthetic construct
  source 1..23: mol_type = other RNA
  modified_base 1: mod_base = OTHER; note = 2'-O-methyluridine-3'-phosphorothioate
  modified_base 2: mod_base = OTHER; note = 2'-deoxy-2'-fluoroguanosine-3'-phosphorothioate
  modified_base 3: mod_base = OTHER; note = 2'-O-methylcytidine-3'-phosphate
  modified_base 4: mod_base = OTHER; note = 2'-deoxy-2'-fluorouridine-3'-phosphate
  modified_base 5: mod_base = OTHER; note = 2'-O-methyluridine-3'-phosphate
  modified_base 6: mod_base = OTHER; note = 2'-deoxy-2'-fluoroguanosine-3'-phosphate
  modified_base 7: mod_base = OTHER; note = 2'-O-methylcytidine-3'-phosphate
  modified_base 8: mod_base = OTHER; note = 2'-deoxy-2'-fluorouridine-3'-phosphate
  modified_base 9: mod_base = OTHER; note = 2'-O-methylcytidine-3'-phosphate
  modified_base 10: mod_base = OTHER; note = 2'-deoxy-2'-fluoroadenosine-3'-phosphate
  modified_base 11: mod_base = OTHER; note = 2'-O-methylguanosine-3'-phosphate
  modified_base 12: mod_base = OTHER; note = 2'-O-methyluridine-3'-phosphate
  modified_base 13: mod_base = OTHER; note = 2'-O-methyluridine-3'-phosphate
  modified_base 14: mod_base = OTHER; note = 2'-deoxy-2'-fluorocytidine-3'-phosphate
  modified_base 15: mod_base = OTHER; note = 2'-O-methyluridine-3'-phosphate
  modified_base 16: mod_base = OTHER; note = 2'-deoxy-2'-fluoroadenosine-3'-phosphate
  modified_base 17: mod_base = OTHER; note = 2'-O-methyluridine-3'-phosphate
  modified_base 18: mod_base = OTHER; note = 2'-deoxy-2'-fluoroadenosine-3'-phosphate
  modified_base 19: mod_base = OTHER; note = 2'-O-methylcytidine-3'-phosphate
  modified_base 20: mod_base = OTHER; note = 2'-deoxy-2'-fluorocytidine-3'-phosphate
  modified_base 21: mod_base = OTHER; note = 2'-O-methyladenosine-3'-phosphorothioate
  modified_base 22: mod_base = OTHER; note = 2'-O-methyluridine-3'-phosphorothioate
  modified_base 23: mod_base = OTHER; note = 2'-O-methyladenosine
tgcttgctcagttctataccata

SEQ ID NO: 561 - RNA, 23 nt, synthetic construct
  source 1..23: mol_type = other RNA
  modified_base 1: mod_base = OTHER; note = 2'-O-methyluridine-3'-phosphorothioate
  modified_base 2: mod_base = OTHER; note = 2'-deoxy-2'-fluorocytidine-3'-phosphorothioate
  modified_base 3: mod_base = OTHER; note = 2'-O-methyluridine-3'-phosphate
  modified_base 4: mod_base = OTHER; note = 2'-deoxy-2'-fluoroguanosine-3'-phosphate
  modified_base 5: mod_base = OTHER; note = 2'-O-methylcytidine-3'-phosphate
  modified_base 6: mod_base = OTHER; note = 2'-deoxy-2'-fluorouridine-3'-phosphate
  modified_base 7: mod_base = OTHER; note = 2'-O-methyluridine-3'-phosphate
  modified_base 8: mod_base = OTHER; note = 2'-deoxy-2'-fluoroguanosine-3'-phosphate
  modified_base 9: mod_base = OTHER; note = 2'-O-methylcytidine-3'-phosphate
  modified_base 10: mod_base = OTHER; note = 2'-deoxy-2'-fluorouridine-3'-phosphate
  modified_base 11: mod_base = OTHER; note = 2'-O-methylcytidine-3'-phosphate
  modified_base 12: mod_base = OTHER; note = 2'-O-methyladenosine-3'-phosphate
  modified_base 13: mod_base = OTHER; note = 2'-O-methylguanosine-3'-phosphate
  modified_base 14: mod_base = OTHER; note = 2'-deoxy-2'-fluorouridine-3'-phosphate
  modified_base 15: mod_base = OTHER; note = 2'-O-methyluridine-3'-phosphate
  modified_base 16: mod_base = OTHER; note = 2'-deoxy-2'-fluorocytidine-3'-phosphate
  modified_base 17: mod_base = OTHER; note = 2'-O-methyluridine-3'-phosphate
  modified_base 18: mod_base = OTHER; note = 2'-deoxy-2'-fluoroadenosine-3'-phosphate
  modified_base 19: mod_base = OTHER; note = 2'-O-methyluridine-3'-phosphate
  modified_base 20: mod_base = OTHER; note = 2'-deoxy-2'-fluoroadenosine-3'-phosphate
  modified_base 21: mod_base = OTHER; note = 2'-O-methylcytidine-3'-phosphorothioate
  modified_base 22: mod_base = OTHER; note = 2'-O-methylcytidine-3'-phosphorothioate
  modified_base 23: mod_base = OTHER; note = 2'-O-methyladenosine
tctgcttgctcagttctatacca

SEQ ID NO: 562 - RNA, 23 nt, synthetic construct
  source 1..23: mol_type = other RNA
  modified_base 1: mod_base = OTHER; note = 2'-O-methyluridine-3'-phosphorothioate
  modified_base 2: mod_base = OTHER; note = 2'-deoxy-2'-fluoroadenosine-3'-phosphorothioate
  modified_base 3: mod_base = OTHER; note = 2'-O-methylguanosine-3'-phosphate
  modified_base 4: mod_base = OTHER; note = 2'-deoxy-2'-fluorocytidine-3'-phosphate
  modified_base 5: mod_base = OTHER; note = 2'-O-methyluridine-3'-phosphate
  modified_base 6: mod_base = OTHER; note = 2'-deoxy-2'-fluoroguanosine-3'-phosphate
  modified_base 7: mod_base = OTHER; note = 2'-O-methylcytidine-3'-phosphate
  modified_base 8: mod_base = OTHER; note = 2'-deoxy-2'-fluorouridine-3'-phosphate
  modified_base 9: mod_base = OTHER; note = 2'-O-methyluridine-3'-phosphate
  modified_base 10: mod_base = OTHER; note = 2'-deoxy-2'-fluoroguanosine-3'-phosphate
  modified_base 11: mod_base = OTHER; note = 2'-O-methylcytidine-3'-phosphate
  modified_base 12: mod_base = OTHER; note = 2'-O-methyluridine-3'-phosphate
  modified_base 13: mod_base = OTHER; note = 2'-O-methylcytidine-3'-phosphate
  modified_base 14: mod_base = OTHER; note = 2'-deoxy-2'-fluoroadenosine-3'-phosphate
  modified_base 15: mod_base = OTHER; note = 2'-O-methylguanosine-3'-phosphate
  modified_base 16: mod_base = OTHER; note = 2'-deoxy-2'-fluorouridine-3'-phosphate
  modified_base 17: mod_base = OTHER; note = 2'-O-methyluridine-3'-phosphate
  modified_base 18: mod_base = OTHER; note = 2'-deoxy-2'-fluorocytidine-3'-phosphate
  modified_base 19: mod_base = OTHER; note = 2'-O-methyluridine-3'-phosphate
  modified_base 20: mod_base = OTHER; note = 2'-deoxy-2'-fluoroadenosine-3'-phosphate
  modified_base 21: mod_base = OTHER; note = 2'-O-methyluridine-3'-phosphorothioate
  modified_base 22: mod_base = OTHER; note = 2'-O-methyladenosine-3'-phosphorothioate
  modified_base 23: mod_base = OTHER; note = 2'-O-methylcytidine
tagctgcttgctcagttctatac

SEQ ID NO: 563 - RNA, 23 nt, synthetic construct
  source 1..23: mol_type = other RNA
  modified_base 1: mod_base = OTHER; note = 2'-O-methyluridine-3'-phosphorothioate
  modified_base 2: mod_base = OTHER; note = 2'-deoxy-2'-fluoroadenosine-3'-phosphorothioate
  modified_base 3: mod_base = OTHER; note = 2'-O-methylcytidine-3'-phosphate
  modified_base 4: mod_base = OTHER; note = 2'-deoxy-2'-fluorocytidine-3'-phosphate
  modified_base 5: mod_base = OTHER; note = 2'-O-methylcytidine-3'-phosphate
  modified_base 6: mod_base = OTHER; note = 2'-deoxy-2'-fluorouridine-3'-phosphate
  modified_base 7: mod_base = OTHER; note = 2'-O-methyluridine-3'-phosphate
  modified_base 8: mod_base = OTHER; note = 2'-deoxy-2'-fluoroguanosine-3'-phosphate
  modified_base 9: mod_base = OTHER; note = 2'-O-methylcytidine-3'-phosphate
  modified_base 10: mod_base = OTHER; note = 2'-deoxy-2'-fluoroadenosine-3'-phosphate
  modified_base 11: mod_base = OTHER; note = 2'-O-methylcytidine-3'-phosphate
  modified_base 12: mod_base = OTHER; note = 2'-O-methyluridine-3'-phosphate
  modified_base 13: mod_base = OTHER; note = 2'-O-methylguanosine-3'-phosphate
  modified_base 14: mod_base = OTHER; note = 2'-deoxy-2'-fluoroguanosine-3'-phosphate
  modified_base 15: mod_base = OTHER; note = 2'-O-methylcytidine-3'-phosphate
  modified_base 16: mod_base = OTHER; note = 2'-deoxy-2'-fluoroadenosine-3'-phosphate
  modified_base 17: mod_base = OTHER; note = 2'-O-methyluridine-3'-phosphate
  modified_base 18: mod_base = OTHER; note = 2'-deoxy-2'-fluorocytidine-3'-phosphate
  modified_base 19: mod_base = OTHER; note = 2'-O-methyluridine-3'-phosphate
  modified_base 20: mod_base = OTHER; note = 2'-deoxy-2'-fluoroguanosine-3'-phosphate
  modified_base 21: mod_base = OTHER; note = 2'-O-methylguanosine-3'-phosphorothioate
  modified_base 22: mod_base = OTHER; note = 2'-O-methylcytidine-3'-phosphorothioate
  modified_base 23: mod_base = OTHER; note = 2'-O-methylcytidine
tacccttgcactggcatctggcc

SEQ ID NO: 564 - RNA, 23 nt, synthetic construct
  source 1..23: mol_type = other RNA
  modified_base 1: mod_base = OTHER; note = 2'-O-methyluridine-3'-phosphorothioate
  modified_base 2: mod_base = OTHER; note = 2'-deoxy-2'-fluoroadenosine-3'-phosphorothioate
  modified_base 3: mod_base = OTHER; note = 2'-O-methyluridine-3'-phosphate
  modified_base 4: mod_base = OTHER; note = 2'-deoxy-2'-fluorocytidine-3'-phosphate
  modified_base 5: mod_base = OTHER; note = 2'-O-methyladenosine-3'-phosphate
  modified_base 6: mod_base = OTHER; note = 2'-deoxy-2'-fluoroguanosine-3'-phosphate
  modified_base 7: mod_base = OTHER; note = 2'-O-methylguanosine-3'-phosphate
  modified_base 8: mod_base = OTHER; note = 2'-deoxy-2'-fluoroadenosine-3'-phosphate
  modified_base 9: mod_base = OTHER; note = 2'-O-methylcytidine-3'-phosphate
  modified_base 10: mod_base = OTHER; note = 2'-deoxy-2'-fluorocytidine-3'-phosphate
  modified_base 11: mod_base = OTHER; note = 2'-O-methylcytidine-3'-phosphate
  modified_base 12: mod_base = OTHER; note = 2'-O-methyluridine-3'-phosphate
  modified_base 13: mod_base = OTHER; note = 2'-O-methyluridine-3'-phosphate
  modified_base 14: mod_base = OTHER; note = 2'-deoxy-2'-fluoroguanosine-3'-phosphate
  modified_base 15: mod_base = OTHER; note = 2'-O-methylcytidine-3'-phosphate
  modified_base 16: mod_base = OTHER; note = 2'-deoxy-2'-fluoroadenosine-3'-phosphate
  modified_base 17: mod_base = OTHER; note = 2'-O-methylcytidine-3'-phosphate
  modified_base 18: mod_base = OTHER; note = 2'-deoxy-2'-fluorouridine-3'-phosphate
  modified_base 19: mod_base = OTHER; note = 2'-O-methylguanosine-3'-phosphate
  modified_base 20: mod_base = OTHER; note = 2'-deoxy-2'-fluoroguanosine-3'-phosphate
  modified_base 21: mod_base = OTHER; note = 2'-O-methylcytidine-3'-phosphorothioate
  modified_base 22: mod_base = OTHER; note = 2'-O-methyladenosine-3'-phosphorothioate
  modified_base 23: mod_base = OTHER; note = 2'-O-methyluridine
tatcaggacccttgcactggcat

SEQ ID NO: 565 - RNA, 23 nt, synthetic construct
  source 1..23: mol_type = other RNA
  modified_base 1: mod_base = OTHER; note = 2'-O-methyluridine-3'-phosphorothioate
  modified_base 2: mod_base = OTHER; note = 2'-deoxy-2'-fluoroguanosine-3'-phosphorothioate
  modified_base 3: mod_base = OTHER; note = 2'-O-methylcytidine-3'-phosphate
  modified_base 4: mod_base = OTHER; note = 2'-deoxy-2'-fluoroadenosine-3'-phosphate
  modified_base 5: mod_base = OTHER; note = 2'-O-methyluridine-3'-phosphate
  modified_base 6: mod_base = OTHER; note = 2'-deoxy-2'-fluorocytidine-3'-phosphate
  modified_base 7: mod_base = OTHER; note = 2'-O-methyladenosine-3'-phosphate
  modified_base 8: mod_base = OTHER; note = 2'-deoxy-2'-fluoroguanosine-3'-phosphate
  modified_base 9: mod_base = OTHER; note = 2'-O-methylguanosine-3'-phosphate
  modified_base 10: mod_base = OTHER; note = 2'-deoxy-2'-fluoroadenosine-3'-phosphate
  modified_base 11: mod_base = OTHER; note = 2'-O-methylcytidine-3'-phosphate
  modified_base 12: mod_base = OTHER; note = 2'-O-methylcytidine-3'-phosphate
  modified_base 13: mod_base = OTHER; note = 2'-O-methylcytidine-3'-phosphate
  modified_base 14: mod_base = OTHER; note = 2'-deoxy-2'-fluorouridine-3'-phosphate
  modified_base 15: mod_base = OTHER; note = 2'-O-methyluridine-3'-phosphate
  modified_base 16: mod_base = OTHER; note = 2'-deoxy-2'-fluoroguanosine-3'-phosphate
  modified_base 17: mod_base = OTHER; note = 2'-O-methylcytidine-3'-phosphate
  modified_base 18: mod_base = OTHER; note = 2'-deoxy-2'-fluoroadenosine-3'-phosphate
  modified_base 19: mod_base = OTHER; note = 2'-O-methylcytidine-3'-phosphate
  modified_base 20: mod_base = OTHER; note = 2'-deoxy-2'-fluorouridine-3'-phosphate
  modified_base 21: mod_base = OTHER; note = 2'-O-methylguanosine-3'-phosphorothioate
  modified_base 22: mod_base = OTHER; note = 2'-O-methylguanosine-3'-phosphorothioate
  modified_base 23: mod_base = OTHER; note = 2'-O-methylcytidine
tgcatcaggacccttgcactggc

SEQ ID NO: 566 - RNA, 23 nt, synthetic construct
  source 1..23: mol_type = other RNA
  modified_base 1: mod_base = OTHER; note = 2'-O-methyladenosine-3'-phosphorothioate
  modified_base 2: mod_base = OTHER; note = 2'-deoxy-2'-fluorouridine-3'-phosphorothioate
  modified_base 3: mod_base = OTHER; note = 2'-O-methylcytidine-3'-phosphate
  modified_base 4: mod_base = OTHER; note = 2'-deoxy-2'-fluoroadenosine-3'-phosphate
  modified_base 5: mod_base = OTHER; note = 2'-O-methyluridine-3'-phosphate
  modified_base 6: mod_base = OTHER; note = 2'-deoxy-2'-fluoroadenosine-3'-phosphate
  modified_base 7: mod_base = OTHER; note = 2'-O-methylguanosine-3'-phosphate
  modified_base 8: mod_base = OTHER; note = 2'-deoxy-2'-fluorocytidine-3'-phosphate
  modified_base 9: mod_base = OTHER; note = 2'-O-methyladenosine-3'-phosphate
  modified_base 10: mod_base = OTHER; note = 2'-deoxy-2'-fluoroguanosine-3'-phosphate
  modified_base 11: mod_base = OTHER; note = 2'-O-methylcytidine-3'-phosphate
  modified_base 12: mod_base = OTHER; note = 2'-O-methyluridine-3'-phosphate
  modified_base 13: mod_base = OTHER; note = 2'-O-methyluridine-3'-phosphate
  modified_base 14: mod_base = OTHER; note = 2'-deoxy-2'-fluoroguanosine-3'-phosphate
  modified_base 15: mod_base = OTHER; note = 2'-O-methylcytidine-3'-phosphate
  modified_base 16: mod_base = OTHER; note = 2'-deoxy-2'-fluorocytidine-3'-phosphate
  modified_base 17: mod_base = OTHER; note = 2'-O-methyluridine-3'-phosphate
  modified_base 18: mod_base = OTHER; note = 2'-deoxy-2'-fluorouridine-3'-phosphate
  modified_base 19: mod_base = OTHER; note = 2'-O-methylguanosine-3'-phosphate
  modified_base 20: mod_base = OTHER; note = 2'-deoxy-2'-fluoroguanosine-3'-phosphate
  modified_base 21: mod_base = OTHER; note = 2'-O-methyluridine-3'-phosphorothioate
  modified_base 22: mod_base = OTHER; note = 2'-O-methylguanosine-3'-phosphorothioate
  modified_base 23: mod_base = OTHER; note = 2'-O-methyluridine
atcatagcagcttgccttggtgt

SEQ ID NO: 567 - RNA, 23 nt, synthetic construct
  source 1..23: mol_type = other RNA
  modified_base 1: mod_base = OTHER; note = 2'-O-methyluridine-3'-phosphorothioate
  modified_base 2: mod_base = OTHER; note = 2'-deoxy-2'-fluoroadenosine-3'-phosphorothioate
  modified_base 3: mod_base = OTHER; note = 2'-O-methyluridine-3'-phosphate
  modified_base 4: mod_base = OTHER; note = 2'-deoxy-2'-fluorocytidine-3'-phosphate
  modified_base 5: mod_base = OTHER; note = 2'-O-methyladenosine-3'-phosphate
  modified_base 6: mod_base = OTHER; note = 2'-deoxy-2'-fluorouridine-3'-phosphate
  modified_base 7: mod_base = OTHER; note = 2'-O-methyladenosine-3'-phosphate
  modified_base 8: mod_base = OTHER; note = 2'-deoxy-2'-fluoroguanosine-3'-phosphate
  modified_base 9: mod_base = OTHER; note = 2'-O-methylcytidine-3'-phosphate
  modified_base 10: mod_base = OTHER; note = 2'-deoxy-2'-fluoroadenosine-3'-phosphate
  modified_base 11: mod_base = OTHER; note = 2'-O-methylguanosine-3'-phosphate
  modified_base 12: mod_base = OTHER; note = 2'-O-methylcytidine-3'-phosphate
  modified_base 13: mod_base = OTHER; note = 2'-O-methyluridine-3'-phosphate
  modified_base 14: mod_base = OTHER; note = 2'-deoxy-2'-fluorouridine-3'-phosphate
  modified_base 15: mod_base = OTHER; note = 2'-O-methylguanosine-3'-phosphate
  modified_base 16: mod_base = OTHER; note = 2'-deoxy-2'-fluorocytidine-3'-phosphate
  modified_base 17: mod_base = OTHER; note = 2'-O-methylcytidine-3'-phosphate
  modified_base 18: mod_base = OTHER; note = 2'-deoxy-2'-fluorouridine-3'-phosphate
  modified_base 19: mod_base = OTHER; note = 2'-O-methyluridine-3'-phosphate
  modified_base 20: mod_base = OTHER; note = 2'-deoxy-2'-fluoroguanosine-3'-phosphate
  modified_base 21: mod_base = OTHER; note = 2'-O-methylguanosine-3'-phosphorothioate
  modified_base 22: mod_base = OTHER; note = 2'-O-methyluridine-3'-phosphorothioate
  modified_base 23: mod_base = OTHER; note = 2'-O-methylguanosine
tatcatagcagcttgccttggtg

SEQ ID NO: 568 - RNA, 23 nt, synthetic construct
  source 1..23: mol_type = other RNA
  modified_base 1: mod_base = OTHER; note = 2'-O-methyluridine-3'-phosphorothioate
  modified_base 2: mod_base = OTHER; note = 2'-deoxy-2'-fluoroadenosine-3'-phosphorothioate
  modified_base 3: mod_base = OTHER; note = 2'-O-methyluridine-3'-phosphate
  modified_base 4: mod_base = OTHER; note = 2'-deoxy-2'-fluoroguanosine-3'-phosphate
  modified_base 5: mod_base = OTHER; note = 2'-O-methyladenosine-3'-phosphate
  modified_base 6: mod_base = OTHER; note = 2'-deoxy-2'-fluoroguanosine-3'-phosphate
  modified_base 7: mod_base = OTHER; note = 2'-O-methyluridine-3'-phosphate
  modified_base 8: mod_base = OTHER; note = 2'-deoxy-2'-fluoroguanosine-3'-phosphate
  modified_base 9: mod_base = OTHER; note = 2'-O-methylguanosine-3'-phosphate
  modified_base 10: mod_base = OTHER; note = 2'-deoxy-2'-fluoroguanosine-3'-phosphate
  modified_base 11: mod_base = OTHER; note = 2'-O-methyladenosine-3'-phosphate
  modified_base 12: mod_base = OTHER; note = 2'-O-methylcytidine-3'-phosphate
  modified_base 13: mod_base = OTHER; note = 2'-O-methyladenosine-3'-phosphate
  modified_base 14: mod_base = OTHER; note = 2'-deoxy-2'-fluorouridine-3'-phosphate
  modified_base 15: mod_base = OTHER; note = 2'-O-methylguanosine-3'-phosphate
  modified_base 16: mod_base = OTHER; note = 2'-deoxy-2'-fluoroadenosine-3'-phosphate
  modified_base 17: mod_base = OTHER; note = 2'-O-methyladenosine-3'-phosphate
  modified_base 18: mod_base = OTHER; note = 2'-deoxy-2'-fluoroguanosine-3'-phosphate
  modified_base 19: mod_base = OTHER; note = 2'-O-methylcytidine-3'-phosphate
  modified_base 20: mod_base = OTHER; note = 2'-deoxy-2'-fluorocytidine-3'-phosphate
  modified_base 21: mod_base = OTHER; note = 2'-O-methyluridine-3'-phosphorothioate
  modified_base 22: mod_base = OTHER; note = 2'-O-methyladenosine-3'-phosphorothioate
  modified_base 23: mod_base = OTHER; note = 2'-O-methylguanosine
tatgagtgggacatgaagcctag

SEQ ID NO: 569 - RNA, 23 nt, synthetic construct
  source 1..23: mol_type = other RNA
  modified_base 1: mod_base = OTHER; note = 2'-O-methyladenosine-3'-phosphorothioate
  modified_base 2: mod_base = OTHER; note = 2'-deoxy-2'-fluoroadenosine-3'-phosphorothioate
  modified_base 3: mod_base = OTHER; note = 2'-O-methylguanosine-3'-phosphate
  modified_base 4: mod_base = OTHER; note = 2'-deoxy-2'-fluoroadenosine-3'-phosphate
  modified_base 5: mod_base = OTHER; note = 2'-O-methylcytidine-3'-phosphate
  modified_base 6: mod_base = OTHER; note = 2'-deoxy-2'-fluoroadenosine-3'-phosphate
  modified_base 7: mod_base = OTHER; note = 2'-O-methylguanosine-3'-phosphate
  modified_base 8: mod_base = OTHER; note = 2'-deoxy-2'-fluoroadenosine-3'-phosphate
  modified_base 9: mod_base = OTHER; note = 2'-O-methylcytidine-3'-phosphate
  modified_base 10: mod_base = OTHER; note = 2'-deoxy-2'-fluorouridine-3'-phosphate
  modified_base 11: mod_base = OTHER; note = 2'-O-methylcytidine-3'-phosphate
  modified_base 12: mod_base = OTHER; note = 2'-O-methyluridine-3'-phosphate
  modified_base 13: mod_base = OTHER; note = 2'-O-methyluridine-3'-phosphate
  modified_base 14: mod_base = OTHER; note = 2'-deoxy-2'-fluoroguanosine-3'-phosphate
  modified_base 15: mod_base = OTHER; note = 2'-O-methylcytidine-3'-phosphate
  modified_base 16: mod_base = OTHER; note = 2'-deoxy-2'-fluoroguanosine-3'-phosphate
  modified_base 17: mod_base = OTHER; note = 2'-O-methylguanosine-3'-phosphate
  modified_base 18: mod_base = OTHER; note = 2'-deoxy-2'-fluoroadenosine-3'-phosphate
  modified_base 19: mod_base = OTHER; note = 2'-O-methylguanosine-3'-phosphate
  modified_base 20: mod_base = OTHER; note = 2'-deoxy-2'-fluorocytidine-3'-phosphate
  modified_base 21: mod_base = OTHER; note = 2'-O-methylcytidine-3'-phosphorothioate
  modified_base 22: mod_base = OTHER; note = 2'-O-methylguanosine-3'-phosphorothioate
  modified_base 23: mod_base = OTHER; note = 2'-O-methylcytidine
aagacagactcttgcggagccgc

SEQ ID NO: 570 - RNA, 23 nt, synthetic construct
  source 1..23: mol_type = other RNA
  modified_base 1: mod_base = OTHER; note = 2'-O-methyluridine-3'-phosphorothioate
  modified_base 2: mod_base = OTHER; note = 2'-deoxy-2'-fluoroadenosine-3'-phosphorothioate
  modified_base 3: mod_base = OTHER; note = 2'-O-methyladenosine-3'-phosphate
  modified_base 4: mod_base = OTHER; note = 2'-deoxy-2'-fluoroguanosine-3'-phosphate
  modified_base 5: mod_base = OTHER; note = 2'-O-methyladenosine-3'-phosphate
  modified_base 6: mod_base = OTHER; note = 2'-deoxy-2'-fluorocytidine-3'-phosphate
  modified_base 7: mod_base = OTHER; note = 2'-O-methyladenosine-3'-phosphate
  modified_base 8: mod_base = OTHER; note = 2'-deoxy-2'-fluoroguanosine-3'-phosphate
  modified_base 9: mod_base = OTHER; note = 2'-O-methyladenosine-3'-phosphate
  modified_base 10: mod_base = OTHER; note = 2'-deoxy-2'-fluorocytidine-3'-phosphate
  modified_base 11: mod_base = OTHER; note = 2'-O-methyluridine-3'-phosphate
  modified_base 12: mod_base = OTHER; note = 2'-O-methylcytidine-3'-phosphate
  modified_base 13: mod_base = OTHER; note = 2'-O-methyluridine-3'-phosphate
  modified_base 14: mod_base = OTHER; note = 2'-deoxy-2'-fluorouridine-3'-phosphate
  modified_base 15: mod_base = OTHER; note = 2'-O-methylguanosine-3'-phosphate
  modified_base 16: mod_base = OTHER; note = 2'-deoxy-2'-fluorocytidine-3'-phosphate
  modified_base 17: mod_base = OTHER; note = 2'-O-methylguanosine-3'-phosphate
  modified_base 18: mod_base = OTHER; note = 2'-deoxy-2'-fluoroguanosine-3'-phosphate
  modified_base 19: mod_base = OTHER; note = 2'-O-methyladenosine-3'-phosphate
  modified_base 20: mod_base = OTHER; note = 2'-deoxy-2'-fluoroguanosine-3'-phosphate
  modified_base 21: mod_base = OTHER; note = 2'-O-methylcytidine-3'-phosphorothioate
  modified_base 22: mod_base = OTHER; note = 2'-O-methylcytidine-3'-phosphorothioate
  modified_base 23: mod_base = OTHER; note = 2'-O-methylguanosine
taagacagactcttgcggagccg

SEQ ID NO: 571 - RNA, 23 nt, synthetic construct
  source 1..23: mol_type = other RNA
  modified_base 1: mod_base = OTHER; note = 2'-O-methyladenosine-3'-phosphorothioate
  modified_base 2: mod_base = OTHER; note = 2'-deoxy-2'-fluorouridine-3'-phosphorothioate
  modified_base 3: mod_base = OTHER; note = 2'-O-methylcytidine-3'-phosphate
  modified_base 4: mod_base = OTHER; note = 2'-deoxy-2'-fluoroguanosine-3'-phosphate
  modified_base 5: mod_base = OTHER; note = 2'-O-methyladenosine-3'-phosphate
  modified_base 6: mod_base = OTHER; note = 2'-deoxy-2'-fluoroadenosine-3'-phosphate
  modified_base 7: mod_base = OTHER; note = 2'-O-methylguanosine-3'-phosphate
  modified_base 8: mod_base = OTHER; note = 2'-deoxy-2'-fluoroadenosine-3'-phosphate
  modified_base 9: mod_base = OTHER; note = 2'-O-methylcytidine-3'-phosphate
  modified_base 10: mod_base = OTHER; note = 2'-deoxy-2'-fluoroadenosine-3'-phosphate
  modified_base 11: mod_base = OTHER; note = 2'-O-methylguanosine-3'-phosphate
  modified_base 12: mod_base = OTHER; note = 2'-O-methyladenosine-3'-phosphate
  modified_base 13: mod_base = OTHER; note = 2'-O-methylcytidine-3'-phosphate
  modified_base 14: mod_base = OTHER; note = 2'-deoxy-2'-fluorouridine-3'-phosphate
  modified_base 15: mod_base = OTHER; note = 2'-O-methylcytidine-3'-phosphate
  modified_base 16: mod_base = OTHER; note = 2'-deoxy-2'-fluorouridine-3'-phosphate
  modified_base 17: mod_base = OTHER; note = 2'-O-methyluridine-3'-phosphate
  modified_base 18: mod_base = OTHER; note = 2'-deoxy-2'-fluoroguanosine-3'-phosphate
  modified_base 19: mod_base = OTHER; note = 2'-O-methylcytidine-3'-phosphate
  modified_base 20: mod_base = OTHER; note = 2'-deoxy-2'-fluoroguanosine-3'-phosphate
  modified_base 21: mod_base = OTHER; note = 2'-O-methylguanosine-3'-phosphorothioate
  modified_base 22: mod_base = OTHER; note = 2'-O-methyladenosine-3'-phosphorothioate
  modified_base 23: mod_base = OTHER; note = 2'-O-methylguanosine
atcgaagacagactcttgcggag

SEQ ID NO: 572 - RNA, 23 nt, synthetic construct
  source 1..23: mol_type = other RNA
  modified_base 1: mod_base = OTHER; note = 2'-O-methyluridine-3'-phosphorothioate
  modified_base 2: mod_base = OTHER; note = 2'-deoxy-2'-fluoroadenosine-3'-phosphorothioate
  modified_base 3: mod_base = OTHER; note = 2'-O-methyluridine-3'-phosphate
  modified_base 4: mod_base = OTHER; note = 2'-deoxy-2'-fluorouridine-3'-phosphate
  modified_base 5: mod_base = OTHER; note = 2'-O-methylcytidine-3'-phosphate
  modified_base 6: mod_base = OTHER; note = 2'-deoxy-2'-fluorouridine-3'-phosphate
  modified_base 7: mod_base = OTHER; note = 2'-O-methyluridine-3'-phosphate
  modified_base 8: mod_base = OTHER; note = 2'-deoxy-2'-fluorocytidine-3'-phosphate
  modified_base 9: mod_base = OTHER; note = 2'-O-methyladenosine-3'-phosphate
  modified_base 10: mod_base = OTHER; note = 2'-deoxy-2'-fluoroguanosine-3'-phosphate
  modified_base 11: mod_base = OTHER; note = 2'-O-methylcytidine-3'-phosphate
  modified_base 12: mod_base = OTHER; note = 2'-O-methylcytidine-3'-phosphate
  modified_base 13: mod_base = OTHER; note = 2'-O-methylcytidine-3'-phosphate
  modified_base 14: mod_base = OTHER; note = 2'-deoxy-2'-fluorocytidine-3'-phosphate
  modified_base 15: mod_base = OTHER; note = 2'-O-methylcytidine-3'-phosphate
  modified_base 16: mod_base = OTHER; note = 2'-deoxy-2'-fluorouridine-3'-phosphate
  modified_base 17: mod_base = OTHER; note = 2'-O-methylcytidine-3'-phosphate
  modified_base 18: mod_base = OTHER; note = 2'-deoxy-2'-fluoroguanosine-3'-phosphate
  modified_base 19: mod_base = OTHER; note = 2'-O-methyladenosine-3'-phosphate
  modified_base 20: mod_base = OTHER; note = 2'-deoxy-2'-fluoroadenosine-3'-phosphate
  modified_base 21: mod_base = OTHER; note = 2'-O-methylcytidine-3'-phosphorothioate
  modified_base 22: mod_base = OTHER; note = 2'-O-methyluridine-3'-phosphorothioate
  modified_base 23: mod_base = OTHER; note = 2'-O-methylguanosine
tattcttcagccccctcgaactg

SEQ ID NO: 573 - RNA, 23 nt, synthetic construct
  source 1..23: mol_type = other RNA
  modified_base 1: mod_base = OTHER; note = 2'-O-methyluridine-3'-phosphorothioate
  modified_base 2: mod_base = OTHER; note = 2'-deoxy-2'-fluoroguanosine-3'-phosphorothioate
  modified_base 3: mod_base = OTHER; note = 2'-O-methylguanosine-3'-phosphate
  modified_base 4: mod_base = OTHER; note = 2'-deoxy-2'-fluoroguanosine-3'-phosphate
  modified_base 5: mod_base = OTHER; note = 2'-O-methyladenosine-3'-phosphate
  modified_base 6: mod_base = OTHER; note = 2'-deoxy-2'-fluorocytidine-3'-phosphate
  modified_base 7: mod_base = OTHER; note = 2'-O-methyladenosine-3'-phosphate
  modified_base 8: mod_base = OTHER; note = 2'-deoxy-2'-fluorocytidine-3'-phosphate
  modified_base 9: mod_base = OTHER; note = 2'-O-methyladenosine-3'-phosphate
  modified_base 10: mod_base = OTHER; note = 2'-deoxy-2'-fluoroadenosine-3'-phosphate
  modified_base 11: mod_base = OTHER; note = 2'-O-methyluridine-3'-phosphate
  modified_base 12: mod_base = OTHER; note = 2'-O-methylcytidine-3'-phosphate
  modified_base 13: mod_base = OTHER; note = 2'-O-methyluridine-3'-phosphate
  modified_base 14: mod_base = OTHER; note = 2'-deoxy-2'-fluorouridine-3'-phosphate
  modified_base 15: mod_base = OTHER; note = 2'-O-methylguanosine-3'-phosphate
  modified_base 16: mod_base = OTHER; note = 2'-deoxy-2'-fluorocytidine-3'-phosphate
  modified_base 17: mod_base = OTHER; note = 2'-O-methylcytidine-3'-phosphate
  modified_base 18: mod_base = OTHER; note = 2'-deoxy-2'-fluorouridine-3'-phosphate
  modified_base 19: mod_base = OTHER; note = 2'-O-methyluridine-3'-phosphate
  modified_base 20: mod_base = OTHER; note = 2'-deoxy-2'-fluorocytidine-3'-phosphate
  modified_base 21: mod_base = OTHER; note = 2'-O-methylcytidine-3'-phosphorothioate
  modified_base 22: mod_base = OTHER; note = 2'-O-methyladenosine-3'-phosphorothioate
  modified_base 23: mod_base = OTHER; note = 2'-O-methyluridine
tgggacacaatcttgccttccat

SEQ ID NO: 574 - RNA, 23 nt, synthetic construct
  source 1..23: mol_type = other RNA
  modified_base 1: mod_base = OTHER; note = 2'-O-methyluridine-3'-phosphorothioate
  modified_base 2: mod_base = OTHER; note = 2'-deoxy-2'-fluoroadenosine-3'-phosphorothioate
  modified_base 3: mod_base = OTHER; note = 2'-O-methyladenosine-3'-phosphate
  modified_base 4: mod_base = OTHER; note = 2'-deoxy-2'-fluorouridine-3'-phosphate
  modified_base 5: mod_base = OTHER; note = 2'-O-methylguanosine-3'-phosphate
  modified_base 6: mod_base = OTHER; note = 2'-deoxy-2'-fluoroguanosine-3'-phosphate
  modified_base 7: mod_base = OTHER; note = 2'-O-methylguanosine-3'-phosphate
  modified_base 8: mod_base = OTHER; note = 2'-deoxy-2'-fluoroadenosine-3'-phosphate
  modified_base 9: mod_base = OTHER; note = 2'-O-methylcytidine-3'-phosphate
  modified_base 10: mod_base = OTHER; note = 2'-deoxy-2'-fluoroadenosine-3'-phosphate
  modified_base 11: mod_base = OTHER; note = 2'-O-methylcytidine-3'-phosphate
  modified_base 12: mod_base = OTHER; note = 2'-O-methyladenosine-3'-phosphate
  modified_base 13: mod_base = OTHER; note = 2'-O-methyladenosine-3'-phosphate
  modified_base 14: mod_base = OTHER; note = 2'-deoxy-2'-fluorouridine-3'-phosphate
  modified_base 15: mod_base = OTHER; note = 2'-O-methylcytidine-3'-phosphate
  modified_base 16: mod_base = OTHER; note = 2'-deoxy-2'-fluorouridine-3'-phosphate
  modified_base 17: mod_base = OTHER; note = 2'-O-methyluridine-3'-phosphate
  modified_base 18: mod_base = OTHER; note = 2'-deoxy-2'-fluoroguanosine-3'-phosphate
  modified_base 19: mod_base = OTHER; note = 2'-O-methylcytidine-3'-phosphate
  modified_base 20: mod_base = OTHER; note = 2'-deoxy-2'-fluorocytidine-3'-phosphate
  modified_base 21: mod_base = OTHER; note = 2'-O-methyluridine-3'-phosphorothioate
  modified_base 22: mod_base = OTHER; note = 2'-O-methyluridine-3'-phosphorothioate
  modified_base 23: mod_base = OTHER; note = 2'-O-methylcytidine
taatgggacacaatcttgccttc

SEQ ID NO: 575 - RNA, 23 nt, synthetic construct
  source 1..23: mol_type = other RNA
  modified_base 1: mod_base = OTHER; note = 2'-O-methyluridine-3'-phosphorothioate
  modified_base 2: mod_base = OTHER; note = 2'-deoxy-2'-fluorouridine-3'-phosphorothioate
  modified_base 3: mod_base = OTHER; note = 2'-O-methylcytidine-3'-phosphate
  modified_base 4: mod_base = OTHER; note = 2'-deoxy-2'-fluoroadenosine-3'-phosphate
  modified_base 5: mod_base = OTHER; note = 2'-O-methyladenosine-3'-phosphate
  modified_base 6: mod_base = OTHER; note = 2'-deoxy-2'-fluoroadenosine-3'-phosphate
  modified_base 7: mod_base = OTHER; note = 2'-O-methylguanosine-3'-phosphate
  modified_base 8: mod_base = OTHER; note = 2'-deoxy-2'-fluorocytidine-3'-phosphate
  modified_base 9: mod_base = OTHER; note = 2'-O-methyladenosine-3'-phosphate
  modified_base 10: mod_base = OTHER; note = 2'-deoxy-2'-fluorocytidine-3'-phosphate
  modified_base 11: mod_base = OTHER; note = 2'-O-methyluridine-3'-phosphate
  modified_base 12: mod_base = OTHER; note = 2'-O-methyluridine-3'-phosphate
  modified_base 13: mod_base = OTHER; note = 2'-O-methyluridine-3'-phosphate
  modified_base 14: mod_base = OTHER; note = 2'-deoxy-2'-fluoroadenosine-3'-phosphate
  modified_base 15: mod_base = OTHER; note = 2'-O-methyluridine-3'-phosphate
  modified_base 16: mod_base = OTHER; note = 2'-deoxy-2'-fluorouridine-3'-phosphate
  modified_base 17: mod_base = OTHER; note = 2'-O-methylguanosine-3'-phosphate
  modified_base 18: mod_base = OTHER; note = 2'-deoxy-2'-fluoroadenosine-3'-phosphate
  modified_base 19: mod_base = OTHER; note = 2'-O-methylguanosine-3'-phosphate
  modified_base 20: mod_base = OTHER; note = 2'-deoxy-2'-fluorouridine-3'-phosphate
  modified_base 21: mod_base = OTHER; note = 2'-O-methyluridine-3'-phosphorothioate
  modified_base 22: mod_base = OTHER; note = 2'-O-methyluridine-3'-phosphorothioate
  modified_base 23: mod_base = OTHER; note = 2'-O-methylcytidine
ttcaaagcactttattgagtttc

SEQ ID NO: 576 - RNA, 23 nt, synthetic construct
  source 1..23: mol_type = other RNA
  modified_base 1: mod_base = OTHER; note = 2'-O-methyladenosine-3'-phosphorothioate
  modified_base 2: mod_base = OTHER; note = 2'-deoxy-2'-fluorocytidine-3'-phosphorothioate
  modified_base 3: mod_base = OTHER; note = 2'-O-methylguanosine-3'-phosphate
  modified_base 4: mod_base = OTHER; note = 2'-deoxy-2'-fluorouridine-3'-phosphate
  modified_base 5: mod_base = OTHER; note = 2'-O-methyluridine-3'-phosphate
  modified_base 6: mod_base = OTHER; note = 2'-deoxy-2'-fluorouridine-3'-phosphate
  modified_base 7: mod_base = OTHER; note = 2'-O-methyluridine-3'-phosphate
  modified_base 8: mod_base = OTHER; note = 2'-deoxy-2'-fluorocytidine-3'-phosphate
  modified_base 9: mod_base = OTHER; note = 2'-O-methyladenosine-3'-phosphate
  modified_base 10: mod_base = OTHER; note = 2'-deoxy-2'-fluoroadenosine-3'-phosphate
  modified_base 11: mod_base = OTHER; note = 2'-O-methyladenosine-3'-phosphate
  modified_base 12: mod_base = OTHER; note = 2'-O-methylguanosine-3'-phosphate
  modified_base 13: mod_base = OTHER; note = 2'-O-methylcytidine-3'-phosphate
  modified_base 14: mod_base = OTHER; note = 2'-deoxy-2'-fluoroadenosine-3'-phosphate
  modified_base 15: mod_base = OTHER; note = 2'-O-methylcytidine-3'-phosphate
  modified_base 16: mod_base = OTHER; note = 2'-deoxy-2'-fluorouridine-3'-phosphate
  modified_base 17: mod_base = OTHER; note = 2'-O-methyluridine-3'-phosphate
  modified_base 18: mod_base = OTHER; note = 2'-deoxy-2'-fluorouridine-3'-phosphate
  modified_base 19: mod_base = OTHER; note = 2'-O-methyladenosine-3'-phosphate
  modified_base 20: mod_base = OTHER; note = 2'-deoxy-2'-fluorouridine-3'-phosphate
  modified_base 21: mod_base = OTHER; note = 2'-O-methyluridine-3'-phosphorothioate
  modified_base 22: mod_base = OTHER; note = 2'-O-methylguanosine-3'-phosphorothioate
  modified_base 23: mod_base = OTHER; note = 2'-O-methyladenosine
acgttttcaaagcactttattga

SEQ ID NO: 577 - RNA, 23 nt, synthetic construct
  source 1..23: mol_type = other RNA
  modified_base 1: mod_base = OTHER; note = 2'-O-methyluridine-3'-phosphorothioate
  modified_base 2: mod_base = OTHER; note = 2'-deoxy-2'-fluorocytidine-3'-phosphorothioate
  modified_base 3: mod_base = OTHER; note = 2'-O-methyluridine-3'-phosphate
  modified_base 4: mod_base = OTHER; note = 2'-deoxy-2'-fluorocytidine-3'-phosphate
  modified_base 5: mod_base = OTHER; note = 2'-O-methyladenosine-3'-phosphate
  modified_base 6: mod_base = OTHER; note = 2'-deoxy-2'-fluoroguanosine-3'-phosphate
  modified_base 7: mod_base = OTHER; note = 2'-O-methylcytidine-3'-phosphate
  modified_base 8: mod_base = OTHER; note = 2'-deoxy-2'-fluoroadenosine-3'-phosphate
  modified_base 9: mod_base = OTHER; note = 2'-O-methyluridine-3'-phosphate
  modified_base 10: mod_base = OTHER; note = 2'-deoxy-2'-fluorouridine-3'-phosphate
  modified_base 11: mod_base = OTHER; note = 2'-O-methyluridine-3'-phosphate
  modified_base 12: mod_base = OTHER; note = 2'-O-methyluridine-3'-phosphate
  modified_base 13: mod_base = OTHER; note = 2'-O-methylcytidine-3'-phosphate
  modified_base 14: mod_base = OTHER; note = 2'-deoxy-2'-fluoroadenosine-3'-phosphate
  modified_base 15: mod_base = OTHER; note = 2'-O-methyladenosine-3'-phosphate
  modified_base 16: mod_base = OTHER; note = 2'-deoxy-2'-fluoroadenosine-3'-phosphate
  modified_base 17: mod_base = OTHER; note = 2'-O-methylguanosine-3'-phosphate
  modified_base 18: mod_base = OTHER; note = 2'-deoxy-2'-fluorocytidine-3'-phosphate
  modified_base 19: mod_base = OTHER; note = 2'-O-methyladenosine-3'-phosphate
  modified_base 20: mod_base = OTHER; note = 2'-deoxy-2'-fluorocytidine-3'-phosphate
  modified_base 21: mod_base = OTHER; note = 2'-O-methyluridine-3'-phosphorothioate
  modified_base 22: mod_base = OTHER; note = 2'-O-methyluridine-3'-phosphorothioate
  modified_base 23: mod_base = OTHER; note = 2'-O-methyluridine
tctcagcattttcaaagcacttt

SEQ ID NO: 578-889 - skipped (312 entries)

SEQ ID NO: 890 - RNA, 21 nt, synthetic construct
  source 1..21: mol_type = other RNA
aactcaataaagtgctttgaa

SEQ ID NO: 891 - RNA, 21 nt, synthetic construct
  source 1..21: mol_type = other RNA
aactcaataaagtgctttgaa

SEQ ID NO: 892 - RNA, 21 nt, synthetic construct
  source 1..21: mol_type = other RNA
aactcaataaagtgctttgaa

SEQ ID NO: 893 - RNA, 21 nt, synthetic construct
  source 1..21: mol_type = other RNA
agcccaagaaagtgaaagaca

SEQ ID NO: 894 - RNA, 21 nt, synthetic construct
  source 1..21: mol_type = other RNA
aataaagtgctttgaaaacgt

SEQ ID NO: 895 - RNA, 21 nt, synthetic construct
  source 1..21: mol_type = other RNA
aataaagtgctttgaaaacgt

SEQ ID NO: 896 - RNA, 21 nt, synthetic construct
  source 1..21: mol_type = other RNA
cagaaagagaagtgctttgaa

SEQ ID NO: 897 - RNA, 21 nt, synthetic construct
  source 1..21: mol_type = other RNA
cagaaagagaagtgctttgaa

SEQ ID NO: 898 - RNA, 23 nt, synthetic construct
  source 1..23: mol_type = other RNA
ttcaaagcactttattgagtttc

SEQ ID NO: 899 - RNA, 23 nt, synthetic construct
  source 1..23: mol_type = other RNA
ttcaaagcactttattgagtttc

SEQ ID NO: 900 - RNA, 23 nt, synthetic construct
  source 1..23: mol_type = other RNA
ttcaaagcactttattgagtttc

SEQ ID NO: 901 - RNA, 23 nt, synthetic construct
  source 1..23: mol_type = other RNA
tgtctttcactttcttgggctcc

SEQ ID NO: 902 - RNA, 23 nt, synthetic construct
  source 1..23: mol_type = other RNA
acgttttcaaagcactttattga

SEQ ID NO: 903 - RNA, 23 nt, synthetic construct
  source 1..23: mol_type = other RNA
acgttttcaaagcactttattga

SEQ ID NO: 904 - RNA, 23 nt, synthetic construct
  source 1..23: mol_type = other RNA
ttcaaagcacttctctttctggc

SEQ ID NO: 905 - RNA, 23 nt, synthetic construct
  source 1..23: mol_type = other RNA
ttcaaagcacttctctttctggc

SEQ ID NO: 906 - RNA, 21 nt, synthetic construct
  source 1..21: mol_type = other RNA
  modified_base 1: mod_base = OTHER; note = 2'-deoxy-2'-fluoroadenosine-3'-phosphorothioate
  modified_base 2: mod_base = OTHER; note = 2'-O-methyladenosine-3'-phosphorothioate
  modified_base 3: mod_base = OTHER; note = 2'-deoxy-2'-fluorocytidine-3'-phosphate
  modified_base 4: mod_base = OTHER; note = 2'-O-methyluridine-3'-phosphate
  modified_base 5: mod_base = OTHER; note = 2'-deoxy-2'-fluorocytidine-3'-phosphate
  modified_base 6: mod_base = OTHER; note = 2'-O-methyladenosine-3'-phosphate
  modified_base 7: mod_base = OTHER; note = 2'-deoxy-2'-fluoroadenosine-3'-phosphate
  modified_base 8: mod_base = OTHER; note = 2'-O-methyluridine-3'-phosphate
  modified_base 9: mod_base = OTHER; note = 2'-deoxy-2'-fluoroadenosine-3'-phosphate
  modified_base 10: mod_base = OTHER; note = 2'-deoxy-2'-fluoroadenosine-3'-phosphate
  modified_base 11: mod_base = OTHER; note = 2'-deoxy-2'-fluoroadenosine-3'-phosphate
  modified_base 12: mod_base = OTHER; note = 2'-O-methylguanosine-3'-phosphate
  modified_base 13: mod_base = OTHER; note = 2'-deoxy-2'-fluorouridine-3'-phosphate
  modified_base 14: mod_base = OTHER; note = 2'-O-methylguanosine-3'-phosphate
  modified_base 15: mod_base = OTHER; note = 2'-deoxy-2'-fluorocytidine-3'-phosphate
  modified_base 16: mod_base = OTHER; note = 2'-O-methyluridine-3'-phosphate
  modified_base 17: mod_base = OTHER; note = 2'-deoxy-2'-fluorouridine-3'-phosphate
  modified_base 18: mod_base = OTHER; note = 2'-O-methyluridine-3'-phosphate
  modified_base 19: mod_base = OTHER; note = 2'-deoxy-2'-fluoroguanosine-3'-phosphate
  modified_base 20: mod_base = OTHER; note = 2'-O-methyladenosine-3'-phosphate
  modified_base 21: mod_base = OTHER; note = 2'-deoxy-2'-fluoroadenosine-3'-phosphate ((2S,4R)-1-[29-[[2-(acetylamino)-2-deoxy-beta-D-galactopyra nosyl]oxy]-14,14-bis[[3-[[3-[[5-[[2-(acetylamino)-2-deoxy-b eta-D-galactopyranosyl]oxy]-1-oxopentyl]amino]propyl]amino] -3-oxopropoxy]methyl]-1,12,19,25-tetraoxo-16-oxa-13,20,24-t riazanonacos-1-yl]-4-hydroxy-2-pyrrolidinyl)methyl ester
aactcaataaagtgctttgaa

SEQ ID NO: 907 - RNA, 21 nt, synthetic construct
  source 1..21: mol_type = other RNA
  modified_base 1: mod_base = OTHER; note = 2'-O-methyladenosine-3'-phosphorothioate
  modified_base 2: mod_base = OTHER; note = 2'-O-methyladenosine-3'-phosphorothioate
  modified_base 3: mod_base = OTHER; note = 2'-O-methylcytidine-3'-phosphate
  modified_base 4: mod_base = OTHER; note = 2'-O-methyluridine-3'-phosphate
  modified_base 5: mod_base = OTHER; note = 2'-O-methylcytidine-3'-phosphate
  modified_base 6: mod_base = OTHER; note = 2'-O-methyladenosine-3'-phosphate
  modified_base 7: mod_base = OTHER; note = 2'-deoxy-2'-fluoroadenosine-3'-phosphate
  modified_base 8: mod_base = OTHER; note = 2'-O-methyluridine-3'-phosphate
  modified_base 9: mod_base = OTHER; note = 2'-deoxy-2'-fluoroadenosine-3'-phosphate
  modified_base 10: mod_base = OTHER; note = 2'-deoxy-2'-fluoroadenosine-3'-phosphate
  modified_base 11: mod_base = OTHER; note = 2'-deoxy-2'-fluoroadenosine-3'-phosphate
  modified_base 12: mod_base = OTHER; note = 2'-O-methylguanosine-3'-phosphate
  modified_base 13: mod_base = OTHER; note = 2'-O-methyluridine-3'-phosphate
  modified_base 14: mod_base = OTHER; note = 2'-O-methylguanosine-3'-phosphate
  modified_base 15: mod_base = OTHER; note = 2'-O-methylcytidine-3'-phosphate
  modified_base 16: mod_base = OTHER; note = 2'-O-methyluridine-3'-phosphate
  modified_base 17: mod_base = OTHER; note = 2'-O-methyluridine-3'-phosphate
  modified_base 18: mod_base = OTHER; note = 2'-O-methyluridine-3'-phosphate
  modified_base 19: mod_base = OTHER; note = 2'-O-methylguanosine-3'-phosphate
  modified_base 20: mod_base = OTHER; note = 2'-O-methyladenosine-3'-phosphate
  modified_base 21: mod_base = OTHER; note = 2'-O-methyladenosine-3'-phosphate ((2S,4R)-1-[29-[[2-(acetylamino)-2-deoxy-beta-D-galactopyra nosyl]oxy]-14,14-bis[[3-[[3-[[5-[[2-(acetylamino)-2-deoxy-b eta-D-galactopyranosyl]oxy]-1-oxopentyl]amino]propyl]amino] -3-oxopropoxy]methyl]-1,12,19,25-tetraoxo-16-oxa-13,20,24-t riazanonacos-1-yl]-4-hydroxy-2-pyrrolidinyl)methyl ester
aactcaataaagtgctttgaa

SEQ ID NO: 908 - RNA, 21 nt, synthetic construct
  source 1..21: mol_type = other RNA
  modified_base 1: mod_base = OTHER; note = 2'-O-methyladenosine-3'-phosphorothioate
  modified_base 2: mod_base = OTHER; note = 2'-O-methyladenosine-3'-phosphorothioate
  modified_base 3: mod_base = OTHER; note = 2'-O-methylcytidine-3'-phosphate
  modified_base 4: mod_base = OTHER; note = 2'-O-methyluridine-3'-phosphate
  modified_base 5: mod_base = OTHER; note = 2'-O-methylcytidine-3'-phosphate
  modified_base 6: mod_base = OTHER; note = 2'-O-methyladenosine-3'-phosphate
  modified_base 7: mod_base = OTHER; note = 2'-deoxy-2'-fluoroadenosine-3'-phosphate
  modified_base 8: mod_base = OTHER; note = 2'-O-methyluridine-3'-phosphate
  modified_base 9: mod_base = OTHER; note = 2'-deoxy-2'-fluoroadenosine-3'-phosphate
  modified_base 10: mod_base = OTHER; note = 2'-deoxy-2'-fluoroadenosine-3'-phosphate
  modified_base 11: mod_base = OTHER; note = 2'-deoxy-2'-fluoroadenosine-3'-phosphate
  modified_base 12: mod_base = OTHER; note = 2'-O-methylguanosine-3'-phosphate
  modified_base 13: mod_base = OTHER; note = 2'-O-methyluridine-3'-phosphate
  modified_base 14: mod_base = OTHER; note = 2'-O-methylguanosine-3'-phosphate
  modified_base 15: mod_base = OTHER; note = 2'-O-methylcytidine-3'-phosphate
  modified_base 16: mod_base = OTHER; note = 2'-O-methyluridine-3'-phosphate
  modified_base 17: mod_base = OTHER; note = 2'-O-methyluridine-3'-phosphate
  modified_base 18: mod_base = OTHER; note = 2'-O-methyluridine-3'-phosphate
  modified_base 19: mod_base = OTHER; note = 2'-O-methylguanosine-3'-phosphate
  modified_base 20: mod_base = OTHER; note = 2'-O-methyladenosine-3'-phosphate
  modified_base 21: mod_base = OTHER; note = 2'-O-methyladenosine-3'-phosphate ((2S,4R)-1-[29-[[2-(acetylamino)-2-deoxy-beta-D-galactopyra nosyl]oxy]-14,14-bis[[3-[[3-[[5-[[2-(acetylamino)-2-deoxy-b eta-D-galactopyranosyl]oxy]-1-oxopentyl]amino]propyl]amino] -3-oxopropoxy]methyl]-1,12,19,25-tetraoxo-16-oxa-13,20,24-t riazanonacos-1-yl]-4-hydroxy-2-pyrrolidinyl)methyl ester
aactcaataaagtgctttgaa

SEQ ID NO: 909 - RNA, 21 nt, synthetic construct
  source 1..21: mol_type = other RNA
  modified_base 1: mod_base = OTHER; note = 2'-deoxy-2'-fluoroadenosine-3'-phosphorothioate
  modified_base 2: mod_base = OTHER; note = 2'-O-methylguanosine-3'-phosphorothioate
  modified_base 3: mod_base = OTHER; note = 2'-deoxy-2'-fluorocytidine-3'-phosphate
  modified_base 4: mod_base = OTHER; note = 2'-O-methylcytidine-3'-phosphate
  modified_base 5: mod_base = OTHER; note = 2'-deoxy-2'-fluorocytidine-3'-phosphate
  modified_base 6: mod_base = OTHER; note = 2'-O-methyladenosine-3'-phosphate
  modified_base 7: mod_base = OTHER; note = 2'-deoxy-2'-fluoroadenosine-3'-phosphate
  modified_base 8: mod_base = OTHER; note = 2'-O-methylguanosine-3'-phosphate
  modified_base 9: mod_base = OTHER; note = 2'-deoxy-2'-fluoroadenosine-3'-phosphate
  modified_base 10: mod_base = OTHER; note = 2'-deoxy-2'-fluoroadenosine-3'-phosphate
  modified_base 11: mod_base = OTHER; note = 2'-deoxy-2'-fluoroadenosine-3'-phosphate
  modified_base 12: mod_base = OTHER; note = 2'-O-methylguanosine-3'-phosphate
  modified_base 13: mod_base = OTHER; note = 2'-deoxy-2'-fluorouridine-3'-phosphate
  modified_base 14: mod_base = OTHER; note = 2'-O-methylguanosine-3'-phosphate
  modified_base 15: mod_base = OTHER; note = 2'-deoxy-2'-fluoroadenosine-3'-phosphate
  modified_base 16: mod_base = OTHER; note = 2'-O-methyladenosine-3'-phosphate
  modified_base 17: mod_base = OTHER; note = 2'-deoxy-2'-fluoroadenosine-3'-phosphate
  modified_base 18: mod_base = OTHER; note = 2'-O-methylguanosine-3'-phosphate
  modified_base 19: mod_base = OTHER; note = 2'-deoxy-2'-fluoroadenosine-3'-phosphate
  modified_base 20: mod_base = OTHER; note = 2'-O-methylcytidine-3'-phosphate
  modified_base 21: mod_base = OTHER; note = 2'-deoxy-2'-fluoroadenosine-3'-phosphate ((2S,4R)-1-[29-[[2-(acetylamino)-2-deoxy-beta-D-galactopyra nosyl]oxy]-14,14-bis[[3-[[3-[[5-[[2-(acetylamino)-2-deoxy-b eta-D-galactopyranosyl]oxy]-1-oxopentyl]amino]propyl]amino] -3-oxopropoxy]methyl]-1,12,19,25-tetraoxo-16-oxa-13,20,24-t riazanonacos-1-yl]-4-hydroxy-2-pyrrolidinyl)methyl ester
agcccaagaaagtgaaagaca

SEQ ID NO: 910 - RNA, 21 nt, synthetic construct
  source 1..21: mol_type = other RNA
  modified_base 1: mod_base = OTHER; note = 2'-O-methyladenosine-3'-phosphorothioate
  modified_base 2: mod_base = OTHER; note = 2'-O-methyladenosine-3'-phosphorothioate
  modified_base 3: mod_base = OTHER; note = 2'-O-methyluridine-3'-phosphate
  modified_base 4: mod_base = OTHER; note = 2'-O-methyladenosine-3'-phosphate
  modified_base 5: mod_base = OTHER; note = 2'-O-methyladenosine-3'-phosphate
  modified_base 6: mod_base = OTHER; note = 2'-O-methyladenosine-3'-phosphate
  modified_base 7: mod_base = OTHER; note = 2'-deoxy-2'-fluoroguanosine-3'-phosphate
  modified_base 8: mod_base = OTHER; note = 2'-O-methyluridine-3'-phosphate
  modified_base 9: mod_base = OTHER; note = 2'-deoxy-2'-fluoroguanosine-3'-phosphate
  modified_base 10: mod_base = OTHER; note = 2'-deoxy-2'-fluorocytidine-3'-phosphate
  modified_base 11: mod_base = OTHER; note = 2'-deoxy-2'-fluorouridine-3'-phosphate
  modified_base 12: mod_base = OTHER; note = 2'-O-methyluridine-3'-phosphate
  modified_base 13: mod_base = OTHER; note = 2'-O-methyluridine-3'-phosphate
  modified_base 14: mod_base = OTHER; note = 2'-O-methylguanosine-3'-phosphate
  modified_base 15: mod_base = OTHER; note = 2'-O-methyladenosine-3'-phosphate
  modified_base 16: mod_base = OTHER; note = 2'-O-methyladenosine-3'-phosphate
  modified_base 17: mod_base = OTHER; note = 2'-O-methyladenosine-3'-phosphate
  modified_base 18: mod_base = OTHER; note = 2'-O-methyladenosine-3'-phosphate
  modified_base 19: mod_base = OTHER; note = 2'-O-methylcytidine-3'-phosphate
  modified_base 20: mod_base = OTHER; note = 2'-O-methylguanosine-3'-phosphate
  modified_base 21: mod_base = OTHER; note = 2'-O-methyluridine-3'-phosphate ((2S,4R)-1-[29-[[2-(acetylamino)-2-deoxy-beta-D-galactopyra nosyl]oxy]-14,14-bis[[3-[[3-[[5-[[2-(acetylamino)-2-deoxy-b eta-D-galactopyranosyl]oxy]-1-oxopentyl]amino]propyl]amino] -3-oxopropoxy]methyl]-1,12,19,25-tetraoxo-16-oxa-13,20,24-t riazanonacos-1-yl]-4-hydroxy-2-pyrrolidinyl)methyl ester
aataaagtgctttgaaaacgt

SEQ ID NO: 911 - RNA, 21 nt, synthetic construct
  source 1..21: mol_type = other RNA
  modified_base 1: mod_base = OTHER; note = 2'-O-methyladenosine-3'-phosphorothioate
  modified_base 2: mod_base = OTHER; note = 2'-O-methyladenosine-3'-phosphorothioate
  modified_base 3: mod_base = OTHER; note = 2'-O-methyluridine-3'-phosphate
  modified_base 4: mod_base = OTHER; note = 2'-O-methyladenosine-3'-phosphate
  modified_base 5: mod_base = OTHER; note = 2'-O-methyladenosine-3'-phosphate
  modified_base 6: mod_base = OTHER; note = 2'-O-methyladenosine-3'-phosphate
  modified_base 7: mod_base = OTHER; note = 2'-deoxy-2'-fluoroguanosine-3'-phosphate
  modified_base 8: mod_base = OTHER; note = 2'-O-methyluridine-3'-phosphate
  modified_base 9: mod_base = OTHER; note = 2'-deoxy-2'-fluoroguanosine-3'-phosphate
  modified_base 10: mod_base = OTHER; note = 2'-deoxy-2'-fluorocytidine-3'-phosphate
  modified_base 11: mod_base = OTHER; note = 2'-deoxy-2'-fluorouridine-3'-phosphate
  modified_base 12: mod_base = OTHER; note = 2'-O-methyluridine-3'-phosphate
  modified_base 13: mod_base = OTHER; note = 2'-O-methyluridine-3'-phosphate
  modified_base 14: mod_base = OTHER; note = 2'-O-methylguanosine-3'-phosphate
  modified_base 15: mod_base = OTHER; note = 2'-O-methyladenosine-3'-phosphate
  modified_base 16: mod_base = OTHER; note = 2'-O-methyladenosine-3'-phosphate
  modified_base 17: mod_base = OTHER; note = 2'-O-methyladenosine-3'-phosphate
  modified_base 18: mod_base = OTHER; note = 2'-O-methyladenosine-3'-phosphate
  modified_base 19: mod_base = OTHER; note = 2'-O-methylcytidine-3'-phosphate
  modified_base 20: mod_base = OTHER; note = 2'-O-methylguanosine-3'-phosphate
  modified_base 21: mod_base = OTHER; note = 2'-O-methyluridine-3'-phosphate ((2S,4R)-1-[29-[[2-(acetylamino)-2-deoxy-beta-D-galactopyra nosyl]oxy]-14,14-bis[[3-[[3-[[5-[[2-(acetylamino)-2-deoxy-b eta-D-galactopyranosyl]oxy]-1-oxopentyl]amino]propyl]amino] -3-oxopropoxy]methyl]-1,12,19,25-tetraoxo-16-oxa-13,20,24-t riazanonacos-1-yl]-4-hydroxy-2-pyrrolidinyl)methyl ester
aataaagtgctttgaaaacgt

SEQ ID NO: 912 - RNA, 21 nt, synthetic construct
  source 1..21: mol_type = other RNA
  modified_base 1: mod_base = OTHER; note = 2'-O-methylcytidine-3'-phosphorothioate
  modified_base 2: mod_base = OTHER; note = 2'-O-methyladenosine-3'-phosphorothioate
  modified_base 3: mod_base = OTHER; note = 2'-O-methylguanosine-3'-phosphate
  modified_base 4: mod_base = OTHER; note = 2'-O-methyladenosine-3'-phosphate
  modified_base 5: mod_base = OTHER; note = 2'-O-methyladenosine-3'-phosphate
  modified_base 6: mod_base = OTHER; note = 2'-O-methyladenosine-3'-phosphate
  modified_base 7: mod_base = OTHER; note = 2'-deoxy-2'-fluoroguanosine-3'-phosphate
  modified_base 8: mod_base = OTHER; note = 2'-O-methyladenosine-3'-phosphate
  modified_base 9: mod_base = OTHER; note = 2'-deoxy-2'-fluoroguanosine-3'-phosphate
  modified_base 10: mod_base = OTHER; note = 2'-deoxy-2'-fluoroadenosine-3'-phosphate
  modified_base 11: mod_base = OTHER; note = 2'-deoxy-2'-fluoroadenosine-3'-phosphate
  modified_base 12: mod_base = OTHER; note = 2'-O-methylguanosine-3'-phosphate
  modified_base 13: mod_base = OTHER; note = 2'-O-methyluridine-3'-phosphate
  modified_base 14: mod_base = OTHER; note = 2'-O-methylguanosine-3'-phosphate
  modified_base 15: mod_base = OTHER; note = 2'-O-methylcytidine-3'-phosphate
  modified_base 16: mod_base = OTHER; note = 2'-O-methyluridine-3'-phosphate
  modified_base 17: mod_base = OTHER; note = 2'-O-methyluridine-3'-phosphate
  modified_base 18: mod_base = OTHER; note = 2'-O-methyluridine-3'-phosphate
  modified_base 19: mod_base = OTHER; note = 2'-O-methylguanosine-3'-phosphate
  modified_base 20: mod_base = OTHER; note = 2'-O-methyladenosine-3'-phosphate
  modified_base 21: mod_base = OTHER; note = 2'-O-methyladenosine-3'-phosphate ((2S,4R)-1-[29-[[2-(acetylamino)-2-deoxy-beta-D-galactopyra nosyl]oxy]-14,14-bis[[3-[[3-[[5-[[2-(acetylamino)-2-deoxy-b eta-D-galactopyranosyl]oxy]-1-oxopentyl]amino]propyl]amino] -3-oxopropoxy]methyl]-1,12,19,25-tetraoxo-16-oxa-13,20,24-t riazanonacos-1-yl]-4-hydroxy-2-pyrrolidinyl)methyl ester
cagaaagagaagtgctttgaa

SEQ ID NO: 913 - RNA, 21 nt, synthetic construct
  source 1..21: mol_type = other RNA
  modified_base 1: mod_base = OTHER; note = 2'-O-methylcytidine-3'-phosphorothioate
  modified_base 2: mod_base = OTHER; note = 2'-O-methyladenosine-3'-phosphorothioate
  modified_base 3: mod_base = OTHER; note = 2'-O-methylguanosine-3'-phosphate
  modified_base 4: mod_base = OTHER; note = 2'-O-methyladenosine-3'-phosphate
  modified_base 5: mod_base = OTHER; note = 2'-O-methyladenosine-3'-phosphate
  modified_base 6: mod_base = OTHER; note = 2'-O-methyladenosine-3'-phosphate
  modified_base 7: mod_base = OTHER; note = 2'-deoxy-2'-fluoroguanosine-3'-phosphate
  modified_base 8: mod_base = OTHER; note = 2'-O-methyladenosine-3'-phosphate
  modified_base 9: mod_base = OTHER; note = 2'-deoxy-2'-fluoroguanosine-3'-phosphate
  modified_base 10: mod_base = OTHER; note = 2'-deoxy-2'-fluoroadenosine-3'-phosphate
  modified_base 11: mod_base = OTHER; note = 2'-deoxy-2'-fluoroadenosine-3'-phosphate
  modified_base 12: mod_base = OTHER; note = 2'-O-methylguanosine-3'-phosphate
  modified_base 13: mod_base = OTHER; note = 2'-O-methyluridine-3'-phosphate
  modified_base 14: mod_base = OTHER; note = 2'-O-methylguanosine-3'-phosphate
  modified_base 15: mod_base = OTHER; note = 2'-O-methylcytidine-3'-phosphate
  modified_base 16: mod_base = OTHER; note = 2'-O-methyluridine-3'-phosphate
  modified_base 17: mod_base = OTHER; note = 2'-O-methyluridine-3'-phosphate
  modified_base 18: mod_base = OTHER; note = 2'-O-methyluridine-3'-phosphate
  modified_base 19: mod_base = OTHER; note = 2'-O-methylguanosine-3'-phosphate
  modified_base 20: mod_base = OTHER; note = 2'-O-methyladenosine-3'-phosphate
  modified_base 21: mod_base = OTHER; note = 2'-O-methyladenosine-3'-phosphate ((2S,4R)-1-[29-[[2-(acetylamino)-2-deoxy-beta-D-galactopyra nosyl]oxy]-14,14-bis[[3-[[3-[[5-[[2-(acetylamino)-2-deoxy-b eta-D-galactopyranosyl]oxy]-1-oxopentyl]amino]propyl]amino] -3-oxopropoxy]methyl]-1,12,19,25-tetraoxo-16-oxa-13,20,24-t riazanonacos-1-yl]-4-hydroxy-2-pyrrolidinyl)methyl ester
cagaaagagaagtgctttgaa

SEQ ID NO: 914 - RNA, 23 nt, synthetic construct
  source 1..23: mol_type = other RNA
  modified_base 1: mod_base = OTHER; note = 2'-O-methyluridine-3'-phosphorothioate
  modified_base 2: mod_base = OTHER; note = 2'-deoxy-2'-fluorouridine-3'-phosphorothioate
  modified_base 3: mod_base = OTHER; note = 2'-O-methylcytidine-3'-phosphate
  modified_base 4: mod_base = OTHER; note = 2'-deoxy-2'-fluoroadenosine-3'-phosphate
  modified_base 5: mod_base = OTHER; note = 2'-O-methyladenosine-3'-phosphate
  modified_base 6: mod_base = OTHER; note = 2'-deoxy-2'-fluoroadenosine-3'-phosphate
  modified_base 7: mod_base = OTHER; note = 2'-O-methylguanosine-3'-phosphate
  modified_base 8: mod_base = OTHER; note = 2'-deoxy-2'-fluorocytidine-3'-phosphate
  modified_base 9: mod_base = OTHER; note = 2'-O-methyladenosine-3'-phosphate
  modified_base 10: mod_base = OTHER; note = 2'-deoxy-2'-fluorocytidine-3'-phosphate
  modified_base 11: mod_base = OTHER; note = 2'-O-methyluridine-3'-phosphate
  modified_base 12: mod_base = OTHER; note = 2'-O-methyluridine-3'-phosphate
  modified_base 13: mod_base = OTHER; note = 2'-O-methyluridine-3'-phosphate
  modified_base 14: mod_base = OTHER; note = 2'-deoxy-2'-fluoroadenosine-3'-phosphate
  modified_base 15: mod_base = OTHER; note = 2'-O-methyluridine-3'-phosphate
  modified_base 16: mod_base = OTHER; note = 2'-deoxy-2'-fluorouridine-3'-phosphate
  modified_base 17: mod_base = OTHER; note = 2'-O-methylguanosine-3'-phosphate
  modified_base 18: mod_base = OTHER; note = 2'-deoxy-2'-fluoroadenosine-3'-phosphate
  modified_base 19: mod_base = OTHER; note = 2'-O-methylguanosine-3'-phosphate
  modified_base 20: mod_base = OTHER; note = 2'-deoxy-2'-fluorouridine-3'-phosphate
  modified_base 21: mod_base = OTHER; note = 2'-O-methyluridine-3'-phosphorothioate
  modified_base 22: mod_base = OTHER; note = 2'-O-methyluridine-3'-phosphorothioate
  modified_base 23: mod_base = OTHER; note = 2'-O-methylcytidine
ttcaaagcactttattgagtttc

SEQ ID NO: 915 - RNA, 23 nt, synthetic construct
  source 1..23: mol_type = other RNA
  modified_base 1: mod_base = OTHER; note = 2'-O-methyluridine-3'-phosphorothioate
  modified_base 2: mod_base = OTHER; note = 2'-deoxy-2'-fluorouridine-3'-phosphorothioate
  modified_base 3: mod_base = OTHER; note = 2'-O-methylcytidine-3'-phosphate
  modified_base 4: mod_base = OTHER; note = 2'-O-methyladenosine-3'-phosphate
  modified_base 5: mod_base = OTHER; note = 2'-O-methyladenosine-3'-phosphate
  modified_base 6: mod_base = OTHER; note = 2'-deoxy-2'-fluoroadenosine-3'-phosphate
  modified_base 7: mod_base = OTHER; note = 2'-O-methylguanosine-3'-phosphate
  modified_base 8: mod_base = OTHER; note = 2'-deoxy-2'-fluorocytidine-3'-phosphate
  modified_base 9: mod_base = OTHER; note = 2'-deoxy-2'-fluoroadenosine-3'-phosphate
  modified_base 10: mod_base = OTHER; note = 2'-O-methylcytidine-3'-phosphate
  modified_base 11: mod_base = OTHER; note = 2'-O-methyluridine-3'-phosphate
  modified_base 12: mod_base = OTHER; note = 2'-O-methyluridine-3'-phosphate
  modified_base 13: mod_base = OTHER; note = 2'-O-methyluridine-3'-phosphate
  modified_base 14: mod_base = OTHER; note = 2'-deoxy-2'-fluoroadenosine-3'-phosphate
  modified_base 15: mod_base = OTHER; note = 2'-O-methyluridine-3'-phosphate
  modified_base 16: mod_base = OTHER; note = 2'-deoxy-2'-fluorouridine-3'-phosphate
  modified_base 17: mod_base = OTHER; note = 2'-O-methylguanosine-3'-phosphate
  modified_base 18: mod_base = OTHER; note = 2'-O-methyladenosine-3'-phosphate
  modified_base 19: mod_base = OTHER; note = 2'-O-methylguanosine-3'-phosphate
  modified_base 20: mod_base = OTHER; note = 2'-O-methyluridine-3'-phosphate
  modified_base 21: mod_base = OTHER; note = 2'-O-methyluridine-3'-phosphorothioate
  modified_base 22: mod_base = OTHER; note = 2'-O-methyluridine-3'-phosphorothioate
  modified_base 23: mod_base = OTHER; note = 2'-O-methylcytidine
ttcaaagcactttattgagtttc

SEQ ID NO: 916 - RNA, 23 nt, synthetic construct
  source 1..23: mol_type = other RNA
  modified_base 1: mod_base = OTHER; note = 2'-deoxy-2'-fluorouridine-3'-phosphorothioate
  modified_base 2: mod_base = OTHER; note = 2'-deoxy-2'-fluorouridine-3'-phosphorothioate
  modified_base 3: mod_base = OTHER; note = 2'-O-methylcytidine-3'-phosphate
  modified_base 4: mod_base = OTHER; note = 2'-O-methyladenosine-3'-phosphate
  modified_base 5: mod_base = OTHER; note = 2'-O-methyladenosine-3'-phosphate
  modified_base 6: mod_base = OTHER; note = 2'-deoxy-2'-fluoroadenosine-3'-phosphate
  modified_base 7: mod_base = OTHER; note = 2'-O-methylguanosine-3'-phosphate
  modified_base 8: mod_base = OTHER; note = 2'-deoxy-2'-fluorocytidine-3'-phosphate
  modified_base 9: mod_base = OTHER; note = 2'-deoxy-2'-fluoroadenosine-3'-phosphate
  modified_base 10: mod_base = OTHER; note = 2'-O-methylcytidine-3'-phosphate
  modified_base 11: mod_base = OTHER; note = 2'-O-methyluridine-3'-phosphate
  modified_base 12: mod_base = OTHER; note = 2'-O-methyluridine-3'-phosphate
  modified_base 13: mod_base = OTHER; note = 2'-O-methyluridine-3'-phosphate
  modified_base 14: mod_base = OTHER; note = 2'-deoxy-2'-fluoroadenosine-3'-phosphate
  modified_base 15: mod_base = OTHER; note = 2'-O-methyluridine-3'-phosphate
  modified_base 16: mod_base = OTHER; note = 2'-deoxy-2'-fluorouridine-3'-phosphate
  modified_base 17: mod_base = OTHER; note = 2'-O-methylguanosine-3'-phosphate
  modified_base 18: mod_base = OTHER; note = 2'-O-methyladenosine-3'-phosphate
  modified_base 19: mod_base = OTHER; note = 2'-O-methylguanosine-3'-phosphate
  modified_base 20: mod_base = OTHER; note = 2'-O-methyluridine-3'-phosphate
  modified_base 21: mod_base = OTHER; note = 2'-O-methyluridine-3'-phosphorothioate
  modified_base 22: mod_base = OTHER; note = 2'-O-methyluridine-3'-phosphorothioate
  modified_base 23: mod_base = OTHER; note = 2'-O-methylcytidine
ttcaaagcactttattgagtttc

SEQ ID NO: 917 - RNA, 23 nt, synthetic construct
  source 1..23: mol_type = other RNA
  modified_base 1: mod_base = OTHER; note = 2'-O-methyluridine-3'-phosphorothioate
  modified_base 2: mod_base = OTHER; note = 2'-deoxy-2'-fluoroguanosine-3'-phosphorothioate
  modified_base 3: mod_base = OTHER; note = 2'-O-methyluridine-3'-phosphate
  modified_base 4: mod_base = OTHER; note = 2'-deoxy-2'-fluorocytidine-3'-phosphate
  modified_base 5: mod_base = OTHER; note = 2'-O-methyluridine-3'-phosphate
  modified_base 6: mod_base = OTHER; note = 2'-deoxy-2'-fluorouridine-3'-phosphate
  modified_base 7: mod_base = OTHER; note = 2'-O-methyluridine-3'-phosphate
  modified_base 8: mod_base = OTHER; note = 2'-deoxy-2'-fluorocytidine-3'-phosphate
  modified_base 9: mod_base = OTHER; note = 2'-O-methyladenosine-3'-phosphate
  modified_base 10: mod_base = OTHER; note = 2'-deoxy-2'-fluorocytidine-3'-phosphate
  modified_base 11: mod_base = OTHER; note = 2'-O-methyluridine-3'-phosphate
  modified_base 12: mod_base = OTHER; note = 2'-O-methyluridine-3'-phosphate
  modified_base 13: mod_base = OTHER; note = 2'-O-methyluridine-3'-phosphate
  modified_base 14: mod_base = OTHER; note = 2'-deoxy-2'-fluorocytidine-3'-phosphate
  modified_base 15: mod_base = OTHER; note = 2'-O-methyluridine-3'-phosphate
  modified_base 16: mod_base = OTHER; note = 2'-deoxy-2'-fluorouridine-3'-phosphate
  modified_base 17: mod_base = OTHER; note = 2'-O-methylguanosine-3'-phosphate
  modified_base 18: mod_base = OTHER; note = 2'-deoxy-2'-fluoroguanosine-3'-phosphate
  modified_base 19: mod_base = OTHER; note = 2'-O-methylguanosine-3'-phosphate
  modified_base 20: mod_base = OTHER; note = 2'-deoxy-2'-fluorocytidine-3'-phosphate
  modified_base 21: mod_base = OTHER; note = 2'-O-methyluridine-3'-phosphorothioate
  modified_base 22: mod_base = OTHER; note = 2'-O-methylcytidine-3'-phosphorothioate
  modified_base 23: mod_base = OTHER; note = 2'-O-methylcytidine
tgtctttcactttcttgggctcc

SEQ ID NO: 918 - RNA, 23 nt, synthetic construct
  source 1..23: mol_type = other RNA
  modified_base 1: mod_base = OTHER; note = 2'-O-methyladenosine-3'-phosphorothioate
  modified_base 2: mod_base = OTHER; note = 2'-deoxy-2'-fluorocytidine-3'-phosphorothioate
  modified_base 3: mod_base = OTHER; note = 2'-O-methylguanosine-3'-phosphate
  modified_base 4: mod_base = OTHER; note = 2'-O-methyluridine-3'-phosphate
  modified_base 5: mod_base = OTHER; note = 2'-O-methyluridine-3'-phosphate
  modified_base 6: mod_base = OTHER; note = 2'-deoxy-2'-fluorouridine-3'-phosphate
  modified_base 7: mod_base = OTHER; note = 2'-O-methyluridine-3'-phosphate
  modified_base 8: mod_base = OTHER; note = 2'-deoxy-2'-fluorocytidine-3'-phosphate
  modified_base 9: mod_base = OTHER; note = 2'-deoxy-2'-fluoroadenosine-3'-phosphate
  modified_base 10: mod_base = OTHER; note = 2'-O-methyladenosine-3'-phosphate
  modified_base 11: mod_base = OTHER; note = 2'-O-methyladenosine-3'-phosphate
  modified_base 12: mod_base = OTHER; note = 2'-O-methylguanosine-3'-phosphate
  modified_base 13: mod_base = OTHER; note = 2'-O-methylcytidine-3'-phosphate
  modified_base 14: mod_base = OTHER; note = 2'-deoxy-2'-fluoroadenosine-3'-phosphate
  modified_base 15: mod_base = OTHER; note = 2'-O-methylcytidine-3'-phosphate
  modified_base 16: mod_base = OTHER; note = 2'-deoxy-2'-fluorouridine-3'-phosphate
  modified_base 17: mod_base = OTHER; note = 2'-O-methyluridine-3'-phosphate
  modified_base 18: mod_base = OTHER; note = 2'-O-methyluridine-3'-phosphate
  modified_base 19: mod_base = OTHER; note = 2'-O-methyladenosine-3'-phosphate
  modified_base 20: mod_base = OTHER; note = 2'-O-methyluridine-3'-phosphate
  modified_base 21: mod_base = OTHER; note = 2'-O-methyluridine-3'-phosphorothioate
  modified_base 22: mod_base = OTHER; note = 2'-O-methylguanosine-3'-phosphorothioate
  modified_base 23: mod_base = OTHER; note = 2'-O-methyladenosine
acgttttcaaagcactttattga

SEQ ID NO: 919 - RNA, 23 nt, synthetic construct
  source 1..23: mol_type = other RNA
  modified_base 1: mod_base = OTHER; note = 2'-deoxy-2'-fluoroadenosine-3'-phosphorothioate
  modified_base 2: mod_base = OTHER; note = 2'-deoxy-2'-fluorocytidine-3'-phosphorothioate
  modified_base 3: mod_base = OTHER; note = 2'-O-methylguanosine-3'-phosphate
  modified_base 4: mod_base = OTHER; note = 2'-O-methyluridine-3'-phosphate
  modified_base 5: mod_base = OTHER; note = 2'-O-methyluridine-3'-phosphate
  modified_base 6: mod_base = OTHER; note = 2'-deoxy-2'-fluorouridine-3'-phosphate
  modified_base 7: mod_base = OTHER; note = 2'-O-methyluridine-3'-phosphate
  modified_base 8: mod_base = OTHER; note = 2'-deoxy-2'-fluorocytidine-3'-phosphate
  modified_base 9: mod_base = OTHER; note = 2'-deoxy-2'-fluoroadenosine-3'-phosphate
  modified_base 10: mod_base = OTHER; note = 2'-O-methyladenosine-3'-phosphate
  modified_base 11: mod_base = OTHER; note = 2'-O-methyladenosine-3'-phosphate
  modified_base 12: mod_base = OTHER; note = 2'-O-methylguanosine-3'-phosphate
  modified_base 13: mod_base = OTHER; note = 2'-O-methylcytidine-3'-phosphate
  modified_base 14: mod_base = OTHER; note = 2'-deoxy-2'-fluoroadenosine-3'-phosphate
  modified_base 15: mod_base = OTHER; note = 2'-O-methylcytidine-3'-phosphate
  modified_base 16: mod_base = OTHER; note = 2'-deoxy-2'-fluorouridine-3'-phosphate
  modified_base 17: mod_base = OTHER; note = 2'-O-methyluridine-3'-phosphate
  modified_base 18: mod_base = OTHER; note = 2'-O-methyluridine-3'-phosphate
  modified_base 19: mod_base = OTHER; note = 2'-O-methyladenosine-3'-phosphate
  modified_base 20: mod_base = OTHER; note = 2'-O-methyluridine-3'-phosphate
  modified_base 21: mod_base = OTHER; note = 2'-O-methyluridine-3'-phosphorothioate
  modified_base 22: mod_base = OTHER; note = 2'-O-methylguanosine-3'-phosphorothioate
  modified_base 23: mod_base = OTHER; note = 2'-O-methyladenosine
acgttttcaaagcactttattga

SEQ ID NO: 920 - RNA, 23 nt, synthetic construct
  source 1..23: mol_type = other RNA
  modified_base 1: mod_base = OTHER; note = 2'-O-methyluridine-3'-phosphorothioate
  modified_base 2: mod_base = OTHER; note = 2'-deoxy-2'-fluorouridine-3'-phosphorothioate
  modified_base 3: mod_base = OTHER; note = 2'-O-methylcytidine-3'-phosphate
  modified_base 4: mod_base = OTHER; note = 2'-O-methyladenosine-3'-phosphate
  modified_base 5: mod_base = OTHER; note = 2'-O-methyladenosine-3'-phosphate
  modified_base 6: mod_base = OTHER; note = 2'-deoxy-2'-fluoroadenosine-3'-phosphate
  modified_base 7: mod_base = OTHER; note = 2'-O-methylguanosine-3'-phosphate
  modified_base 8: mod_base = OTHER; note = 2'-deoxy-2'-fluorocytidine-3'-phosphate
  modified_base 9: mod_base = OTHER; note = 2'-deoxy-2'-fluoroadenosine-3'-phosphate
  modified_base 10: mod_base = OTHER; note = 2'-O-methylcytidine-3'-phosphate
  modified_base 11: mod_base = OTHER; note = 2'-O-methyluridine-3'-phosphate
  modified_base 12: mod_base = OTHER; note = 2'-O-methyluridine-3'-phosphate
  modified_base 13: mod_base = OTHER; note = 2'-O-methylcytidine-3'-phosphate
  modified_base 14: mod_base = OTHER; note = 2'-deoxy-2'-fluorouridine-3'-phosphate
  modified_base 15: mod_base = OTHER; note = 2'-O-methylcytidine-3'-phosphate
  modified_base 16: mod_base = OTHER; note = 2'-deoxy-2'-fluorouridine-3'-phosphate
  modified_base 17: mod_base = OTHER; note = 2'-O-methyluridine-3'-phosphate
  modified_base 18: mod_base = OTHER; note = 2'-O-methyluridine-3'-phosphate
  modified_base 19: mod_base = OTHER; note = 2'-O-methylcytidine-3'-phosphate
  modified_base 20: mod_base = OTHER; note = 2'-O-methyluridine-3'-phosphate
  modified_base 21: mod_base = OTHER; note = 2'-O-methylguanosine-3'-phosphorothioate
  modified_base 22: mod_base = OTHER; note = 2'-O-methylguanosine-3'-phosphorothioate
  modified_base 23: mod_base = OTHER; note = 2'-O-methylcytidine
ttcaaagcacttctctttctggc

SEQ ID NO: 921 - RNA, 23 nt, synthetic construct
  source 1..23: mol_type = other RNA
  modified_base 1: mod_base = OTHER; note = 2'-deoxy-2'-fluorouridine-3'-phosphorothioate
  modified_base 2: mod_base = OTHER; note = 2'-deoxy-2'-fluorouridine-3'-phosphorothioate
  modified_base 3: mod_base = OTHER; note = 2'-O-methylcytidine-3'-phosphate
  modified_base 4: mod_base = OTHER; note = 2'-O-methyladenosine-3'-phosphate
  modified_base 5: mod_base = OTHER; note = 2'-O-methyladenosine-3'-phosphate
  modified_base 6: mod_base = OTHER; note = 2'-deoxy-2'-fluoroadenosine-3'-phosphate
  modified_base 7: mod_base = OTHER; note = 2'-O-methylguanosine-3'-phosphate
  modified_base 8: mod_base = OTHER; note = 2'-deoxy-2'-fluorocytidine-3'-phosphate
  modified_base 9: mod_base = OTHER; note = 2'-deoxy-2'-fluoroadenosine-3'-phosphate
  modified_base 10: mod_base = OTHER; note = 2'-O-methylcytidine-3'-phosphate
  modified_base 11: mod_base = OTHER; note = 2'-O-methyluridine-3'-phosphate
  modified_base 12: mod_base = OTHER; note = 2'-O-methyluridine-3'-phosphate
  modified_base 13: mod_base = OTHER; note = 2'-O-methylcytidine-3'-phosphate
  modified_base 14: mod_base = OTHER; note = 2'-deoxy-2'-fluorouridine-3'-phosphate
  modified_base 15: mod_base = OTHER; note = 2'-O-methylcytidine-3'-phosphate
  modified_base 16: mod_base = OTHER; note = 2'-deoxy-2'-fluorouridine-3'-phosphate
  modified_base 17: mod_base = OTHER; note = 2'-O-methyluridine-3'-phosphate
  modified_base 18: mod_base = OTHER; note = 2'-O-methyluridine-3'-phosphate
  modified_base 19: mod_base = OTHER; note = 2'-O-methylcytidine-3'-phosphate
  modified_base 20: mod_base = OTHER; note = 2'-O-methyluridine-3'-phosphate
  modified_base 21: mod_base = OTHER; note = 2'-O-methylguanosine-3'-phosphorothioate
  modified_base 22: mod_base = OTHER; note = 2'-O-methylguanosine-3'-phosphorothioate
  modified_base 23: mod_base = OTHER; note = 2'-O-methylcytidine
ttcaaagcacttctctttctggc

SEQ ID NO: 922-945 - skipped (24 entries)

SEQ ID NO: 946 - RNA, 19 nt, synthetic construct
  source 1..19: mol_type = other RNA
gactcctggataggcagct

SEQ ID NO: 947 - RNA, 19 nt, synthetic construct
  source 1..19: mol_type = other RNA
taggcagctggaccaacga

SEQ ID NO: 948 - RNA, 19 nt, synthetic construct
  source 1..19: mol_type = other RNA
accaacggacggatgccat

SEQ ID NO: 949 - RNA, 19 nt, synthetic construct
  source 1..19: mol_type = other RNA
atgccatgagggctctgct

SEQ ID NO: 950 - RNA, 19 nt, synthetic construct
  source 1..19: mol_type = other RNA
gctctgctgctcctggggt

SEQ ID NO: 951 - RNA, 19 nt, synthetic construct
  source 1..19: mol_type = other RNA
tcctggggttcctgctggt

SEQ ID NO: 952 - RNA, 19 nt, synthetic construct
  source 1..19: mol_type = other RNA
ctgctggtgagcttggagt

SEQ ID NO: 953 - RNA, 19 nt, synthetic construct
  source 1..19: mol_type = other RNA
cttggagtcaacactttca

SEQ ID NO: 954 - RNA, 19 nt, synthetic construct
  source 1..19: mol_type = other RNA
actttcgattccaccttga

SEQ ID NO: 955 - RNA, 19 nt, synthetic construct
  source 1..19: mol_type = other RNA
ccaccttgggaagccccca

SEQ ID NO: 956 - RNA, 19 nt, synthetic construct
  source 1..19: mol_type = other RNA
gcccccaaggagcataagt

SEQ ID NO: 957 - RNA, 19 nt, synthetic construct
  source 1..19: mol_type = other RNA
cataagtacaaagctgaaa

SEQ ID NO: 958 - RNA, 19 nt, synthetic construct
  source 1..19: mol_type = other RNA
aagctgaagagcacacagt

SEQ ID NO: 959 - RNA, 19 nt, synthetic construct
  source 1..19: mol_type = other RNA
acacagtcgttctcactgt

SEQ ID NO: 960 - RNA, 19 nt, synthetic construct
  source 1..19: mol_type = other RNA
ttctcactgtcaccgggga

SEQ ID NO: 961 - RNA, 19 nt, synthetic construct
  source 1..19: mol_type = other RNA
accggggagccctgccact

SEQ ID NO: 962 - RNA, 19 nt, synthetic construct
  source 1..19: mol_type = other RNA
tgccacttccccttccagt

SEQ ID NO: 963 - RNA, 19 nt, synthetic construct
  source 1..19: mol_type = other RNA
ttccagtaccaccggcaga

SEQ ID NO: 964 - RNA, 19 nt, synthetic construct
  source 1..19: mol_type = other RNA
accggcagctgtaccacaa

SEQ ID NO: 965 - RNA, 19 nt, synthetic construct
  source 1..19: mol_type = other RNA
taccacaaatgtacccaca

SEQ ID NO: 966 - RNA, 19 nt, synthetic construct
  source 1..19: mol_type = other RNA
tacccacaagggccggcca

SEQ ID NO: 967 - RNA, 19 nt, synthetic construct
  source 1..19: mol_type = other RNA
gccggccaggccctcagca

SEQ ID NO: 968 - RNA, 19 nt, synthetic construct
  source 1..19: mol_type = other RNA
ctcagccctggtgtgctaa

SEQ ID NO: 969 - RNA, 19 nt, synthetic construct
  source 1..19: mol_type = other RNA
tgtgctaccacccccaact

SEQ ID NO: 970 - RNA, 19 nt, synthetic construct
  source 1..19: mol_type = other RNA
acccccaactttgatcaga

SEQ ID NO: 971 - RNA, 19 nt, synthetic construct
  source 1..19: mol_type = other RNA
atcaggaccagcgatggga

SEQ ID NO: 972 - RNA, 19 nt, synthetic construct
  source 1..19: mol_type = other RNA
agcgatggggatactgttt

SEQ ID NO: 973 - RNA, 19 nt, synthetic construct
  source 1..19: mol_type = other RNA
tactgtttggagcccaaga

SEQ ID NO: 974 - RNA, 19 nt, synthetic construct
  source 1..19: mol_type = other RNA
ccaagaaagtgaaagacca

SEQ ID NO: 975 - RNA, 19 nt, synthetic construct
  source 1..19: mol_type = other RNA
aaagaccactgcagcaaac

SEQ ID NO: 976 - RNA, 19 nt, synthetic construct
  source 1..19: mol_type = other RNA
tgcagcaaacacagcccct

SEQ ID NO: 977 - RNA, 19 nt, synthetic construct
  source 1..19: mol_type = other RNA
agcccctgccagaaaggaa

SEQ ID NO: 978 - RNA, 19 nt, synthetic construct
  source 1..19: mol_type = other RNA
agaaaggagggacctgtgt

SEQ ID NO: 979 - RNA, 19 nt, synthetic construct
  source 1..19: mol_type = other RNA
acctgtgtgaacatgccaa

SEQ ID NO: 980 - RNA, 19 nt, synthetic construct
  source 1..19: mol_type = other RNA
atgccaagcggcccccact

SEQ ID NO: 981 - RNA, 19 nt, synthetic construct
  source 1..19: mol_type = other RNA
gcccccactgtctctgtca

SEQ ID NO: 982 - RNA, 19 nt, synthetic construct
  source 1..19: mol_type = other RNA
cacctcactggaaaccact

SEQ ID NO: 983 - RNA, 19 nt, synthetic construct
  source 1..19: mol_type = other RNA
aaccactgccagaaagaga

SEQ ID NO: 984 - RNA, 19 nt, synthetic construct
  source 1..19: mol_type = other RNA
cagaaagagaagtgcttta

SEQ ID NO: 985 - RNA, 19 nt, synthetic construct
  source 1..19: mol_type = other RNA
tgctttgagcctcagctta

SEQ ID NO: 986 - RNA, 19 nt, synthetic construct
  source 1..19: mol_type = other RNA
cagcttctccggtttttca

SEQ ID NO: 987 - RNA, 19 nt, synthetic construct
  source 1..19: mol_type = other RNA
cggtttttccacaagaata

SEQ ID NO: 988 - RNA, 19 nt, synthetic construct
  source 1..19: mol_type = other RNA
caagaatgagatatggtat

SEQ ID NO: 989 - RNA, 19 nt, synthetic construct
  source 1..19: mol_type = other RNA
tatggtatagaactgagca

SEQ ID NO: 990 - RNA, 19 nt, synthetic construct
  source 1..19: mol_type = other RNA
tgagcaagcagctgtggca

SEQ ID NO: 991 - RNA, 19 nt, synthetic construct
  source 1..19: mol_type = other RNA
gctgtggccagatgccagt

SEQ ID NO: 992 - RNA, 19 nt, synthetic construct
  source 1..19: mol_type = other RNA
atgccagtgcaagggtcct

SEQ ID NO: 993 - RNA, 19 nt, synthetic construct
  source 1..19: mol_type = other RNA
aagggtcctgatgcccact

SEQ ID NO: 994 - RNA, 19 nt, synthetic construct
  source 1..19: mol_type = other RNA
tgcccactgccagcggcta

SEQ ID NO: 995 - RNA, 19 nt, synthetic construct
  source 1..19: mol_type = other RNA
cggctggccagccaggcct

SEQ ID NO: 996 - RNA, 19 nt, synthetic construct
  source 1..19: mol_type = other RNA
agccaggcctgccgcacca

SEQ ID NO: 997 - RNA, 19 nt, synthetic construct
  source 1..19: mol_type = other RNA
cgcaccaacccgtgcctca

SEQ ID NO: 998 - RNA, 19 nt, synthetic construct
  source 1..19: mol_type = other RNA
tgcctccatgggggtcgct

SEQ ID NO: 999 - RNA, 19 nt, synthetic construct
  source 1..19: mol_type = other RNA
ggggtcgctgcctagaggt

SEQ ID NO: 1000 - RNA, 19 nt, synthetic construct
  source 1..19: mol_type = other RNA
ctagaggtggagggccaca

SEQ ID NO: 1001 - RNA, 19 nt, synthetic construct
  source 1..19: mol_type = other RNA
agggccaccgcctgtgcca

SEQ ID NO: 1002 - RNA, 19 nt, synthetic construct
  source 1..19: mol_type = other RNA
tgtgccactgcccggtgga

SEQ ID NO: 1003 - RNA, 19 nt, synthetic construct
  source 1..19: mol_type = other RNA
cggtgggctacaccggaga

SEQ ID NO: 1004 - RNA, 19 nt, synthetic construct
  source 1..19: mol_type = other RNA
accggagccttctgcgaca

SEQ ID NO: 1005 - RNA, 19 nt, synthetic construct
  source 1..19: mol_type = other RNA
ttctgcgacgtggacacca

SEQ ID NO: 1006 - RNA, 19 nt, synthetic construct
  source 1..19: mol_type = other RNA
gacaccaaggcaagctgct

SEQ ID NO: 1007 - RNA, 19 nt, synthetic construct
  source 1..19: mol_type = other RNA
caagctgctatgatggcca

SEQ ID NO: 1008 - RNA, 19 nt, synthetic construct
  source 1..19: mol_type = other RNA
gatggccgcgggctcagct

SEQ ID NO: 1009 - RNA, 19 nt, synthetic construct
  source 1..19: mol_type = other RNA
tcagctaccgcggcctgga

SEQ ID NO: 1010 - RNA, 19 nt, synthetic construct
  source 1..19: mol_type = other RNA
cggcctggccaggaccaca

SEQ ID NO: 1011 - RNA, 19 nt, synthetic construct
  source 1..19: mol_type = other RNA
aggaccacgctctcgggta

SEQ ID NO: 1012 - RNA, 19 nt, synthetic construct
  source 1..19: mol_type = other RNA
tcgggtgcgccctgtcaga

SEQ ID NO: 1013 - RNA, 19 nt, synthetic construct
  source 1..19: mol_type = other RNA
ctgtcagccgtgggcctca

SEQ ID NO: 1014 - RNA, 19 nt, synthetic construct
  source 1..19: mol_type = other RNA
tgggcctcggaggccacct

SEQ ID NO: 1015 - RNA, 19 nt, synthetic construct
  source 1..19: mol_type = other RNA
ccacctaccggaacgtgaa

SEQ ID NO: 1016 - RNA, 19 nt, synthetic construct
  source 1..19: mol_type = other RNA
aacgtgactgccgagcaaa

SEQ ID NO: 1017 - RNA, 19 nt, synthetic construct
  source 1..19: mol_type = other RNA
cgagcaagcgcggaactga

SEQ ID NO: 1018 - RNA, 19 nt, synthetic construct
  source 1..19: mol_type = other RNA
cggaactggggactgggca

SEQ ID NO: 1019 - RNA, 19 nt, synthetic construct
  source 1..19: mol_type = other RNA
gactgggcggccacgcctt

SEQ ID NO: 1020 - RNA, 19 nt, synthetic construct
  source 1..19: mol_type = other RNA
acgccttctgccggaacca

SEQ ID NO: 1021 - RNA, 19 nt, synthetic construct
  source 1..19: mol_type = other RNA
cggaacccggacaacgaca

SEQ ID NO: 1022 - RNA, 19 nt, synthetic construct
  source 1..19: mol_type = other RNA
aacgacatccgcccgtggt

SEQ ID NO: 1023 - RNA, 19 nt, synthetic construct
  source 1..19: mol_type = other RNA
gcccgtggtgcttcgtgct

SEQ ID NO: 1024 - RNA, 19 nt, synthetic construct
  source 1..19: mol_type = other RNA
ttcgtgctgaaccgcgaca

SEQ ID NO: 1025 - RNA, 19 nt, synthetic construct
  source 1..19: mol_type = other RNA
accgcgaccggctgagcta

SEQ ID NO: 1026 - RNA, 19 nt, synthetic construct
  source 1..19: mol_type = other RNA
ctgagctgggagtactgca

SEQ ID NO: 1027 - RNA, 19 nt, synthetic construct
  source 1..19: mol_type = other RNA
tactgcgacctggcacagt

SEQ ID NO: 1028 - RNA, 19 nt, synthetic construct
  source 1..19: mol_type = other RNA
tggcacagtgccagaccca

SEQ ID NO: 1029 - RNA, 19 nt, synthetic construct
  source 1..19: mol_type = other RNA
agaccccaacccaggcgga

SEQ ID NO: 1030 - RNA, 19 nt, synthetic construct
  source 1..19: mol_type = other RNA
aggcggcgcctccgaccca

SEQ ID NO: 1031 - RNA, 19 nt, synthetic construct
  source 1..19: mol_type = other RNA
tccgaccccggtgtcccct

SEQ ID NO: 1032 - RNA, 19 nt, synthetic construct
  source 1..19: mol_type = other RNA
tgtcccctaggcttcatgt

SEQ ID NO: 1033 - RNA, 19 nt, synthetic construct
  source 1..19: mol_type = other RNA
ttcatgtcccactcatgca

SEQ ID NO: 1034 - RNA, 19 nt, synthetic construct
  source 1..19: mol_type = other RNA
actcatgcccgcgcagcca

SEQ ID NO: 1035 - RNA, 19 nt, synthetic construct
  source 1..19: mol_type = other RNA
cgcagccggcaccgccgaa

SEQ ID NO: 1036 - RNA, 19 nt, synthetic construct
  source 1..19: mol_type = other RNA
accgccgaagcctcagcca

SEQ ID NO: 1037 - RNA, 19 nt, synthetic construct
  source 1..19: mol_type = other RNA
tcagcccacgacccggaca

SEQ ID NO: 1038 - RNA, 19 nt, synthetic construct
  source 1..19: mol_type = other RNA
acccggaccccgcctcagt

SEQ ID NO: 1039 - RNA, 19 nt, synthetic construct
  source 1..19: mol_type = other RNA
cctcagtcccagaccccga

SEQ ID NO: 1040 - RNA, 19 nt, synthetic construct
  source 1..19: mol_type = other RNA
agaccccgggagccttgca

SEQ ID NO: 1041 - RNA, 19 nt, synthetic construct
  source 1..19: mol_type = other RNA
ccttgccggcgaagcggga

SEQ ID NO: 1042 - RNA, 19 nt, synthetic construct
  source 1..19: mol_type = other RNA
aagcgggagcagccgcctt

SEQ ID NO: 1043 - RNA, 19 nt, synthetic construct
  source 1..19: mol_type = other RNA
agccgccttccctgaccaa

SEQ ID NO: 1044 - RNA, 19 nt, synthetic construct
  source 1..19: mol_type = other RNA
tgaccaggaacggcccact

SEQ ID NO: 1045 - RNA, 19 nt, synthetic construct
  source 1..19: mol_type = other RNA
cggcccactgagctgcgga

SEQ ID NO: 1046 - RNA, 19 nt, synthetic construct
  source 1..19: mol_type = other RNA
tgcgggcagcggctccgca

SEQ ID NO: 1047 - RNA, 19 nt, synthetic construct
  source 1..19: mol_type = other RNA
cggctccgcaagagtctgt

SEQ ID NO: 1048 - RNA, 19 nt, synthetic construct
  source 1..19: mol_type = other RNA
agtctgtcttcgatgacca

SEQ ID NO: 1049 - RNA, 19 nt, synthetic construct
  source 1..19: mol_type = other RNA
cgatgacccgcgtcgttga

SEQ ID NO: 1050 - RNA, 19 nt, synthetic construct
  source 1..19: mol_type = other RNA
tcgttggcgggctggtgga

SEQ ID NO: 1051 - RNA, 19 nt, synthetic construct
  source 1..19: mol_type = other RNA
tggtggcgctacgcgggga

SEQ ID NO: 1052 - RNA, 19 nt, synthetic construct
  source 1..19: mol_type = other RNA
tacgcggggcgcaccccta

SEQ ID NO: 1053 - RNA, 19 nt, synthetic construct
  source 1..19: mol_type = other RNA
acccctacatcgccgcgct

SEQ ID NO: 1054 - RNA, 19 nt, synthetic construct
  source 1..19: mol_type = other RNA
gccgcgctgtactggggca

SEQ ID NO: 1055 - RNA, 19 nt, synthetic construct
  source 1..19: mol_type = other RNA
ctggggccacagtttctga

SEQ ID NO: 1056 - RNA, 19 nt, synthetic construct
  source 1..19: mol_type = other RNA
tttctgcgccggcagccta

SEQ ID NO: 1057 - RNA, 19 nt, synthetic construct
  source 1..19: mol_type = other RNA
cggcagcctcatcgcccca

SEQ ID NO: 1058 - RNA, 19 nt, synthetic construct
  source 1..19: mol_type = other RNA
tcgccccctgctgggtgct

SEQ ID NO: 1059 - RNA, 19 nt, synthetic construct
  source 1..19: mol_type = other RNA
tgggtgctgacggccgcta

SEQ ID NO: 1060 - RNA, 19 nt, synthetic construct
  source 1..19: mol_type = other RNA
gccgctcactgcctgcaga

SEQ ID NO: 1061 - RNA, 19 nt, synthetic construct
  source 1..19: mol_type = other RNA
ctgcaggaccggcccgcaa

SEQ ID NO: 1062 - RNA, 19 nt, synthetic construct
  source 1..19: mol_type = other RNA
ggcccgcacccgaggatct

SEQ ID NO: 1063 - RNA, 19 nt, synthetic construct
  source 1..19: mol_type = other RNA
cgaggatctgacggtggta

SEQ ID NO: 1064 - RNA, 19 nt, synthetic construct
  source 1..19: mol_type = other RNA
gtggtgctcggccaggaaa

SEQ ID NO: 1065 - RNA, 19 nt, synthetic construct
  source 1..19: mol_type = other RNA
gccaggaacgccgtaacca

SEQ ID NO: 1066 - RNA, 19 nt, synthetic construct
  source 1..19: mol_type = other RNA
cgtaaccacagctgtgaga

SEQ ID NO: 1067 - RNA, 19 nt, synthetic construct
  source 1..19: mol_type = other RNA
tgtgagccgtgccagacgt

SEQ ID NO: 1068 - RNA, 19 nt, synthetic construct
  source 1..19: mol_type = other RNA
tgccagacgttggccgtga

SEQ ID NO: 1069 - RNA, 19 nt, synthetic construct
  source 1..19: mol_type = other RNA
gccgtgcgctcctaccgct

SEQ ID NO: 1070 - RNA, 19 nt, synthetic construct
  source 1..19: mol_type = other RNA
taccgcttgcacgaggcct

SEQ ID NO: 1071 - RNA, 19 nt, synthetic construct
  source 1..19: mol_type = other RNA
acgaggccttctcgcccgt

SEQ ID NO: 1072 - RNA, 19 nt, synthetic construct
  source 1..19: mol_type = other RNA
tcgcccgtcagctaccaga

SEQ ID NO: 1073 - RNA, 19 nt, synthetic construct
  source 1..19: mol_type = other RNA
ctaccagcacgacctggct

SEQ ID NO: 1074 - RNA, 19 nt, synthetic construct
  source 1..19: mol_type = other RNA
acctggctctgttgcgcct

SEQ ID NO: 1075 - RNA, 19 nt, synthetic construct
  source 1..19: mol_type = other RNA
ttgcgccttcaggaggata

SEQ ID NO: 1076 - RNA, 19 nt, synthetic construct
  source 1..19: mol_type = other RNA
gaggatgcggacggcagct

SEQ ID NO: 1077 - RNA, 19 nt, synthetic construct
  source 1..19: mol_type = other RNA
acggcagctgcgcgctcct

SEQ ID NO: 1078 - RNA, 19 nt, synthetic construct
  source 1..19: mol_type = other RNA
cgctcctgtcgccttacgt

SEQ ID NO: 1079 - RNA, 19 nt, synthetic construct
  source 1..19: mol_type = other RNA
ccttacgttcagccggtgt

SEQ ID NO: 1080 - RNA, 19 nt, synthetic construct
  source 1..19: mol_type = other RNA
agccggtgtgcctgccaaa

SEQ ID NO: 1081 - RNA, 19 nt, synthetic construct
  source 1..19: mol_type = other RNA
tgccaagcggcgccgcgca

SEQ ID NO: 1082 - RNA, 19 nt, synthetic construct
  source 1..19: mol_type = other RNA
gcgccgcgcgaccctccga

SEQ ID NO: 1083 - RNA, 19 nt, synthetic construct
  source 1..19: mol_type = other RNA
ccctccgagaccacgctct

SEQ ID NO: 1084 - RNA, 19 nt, synthetic construct
  source 1..19: mol_type = other RNA
cgctctgccaggtggccga

SEQ ID NO: 1085 - RNA, 19 nt, synthetic construct
  source 1..19: mol_type = other RNA
aggtggccggctggggcca

SEQ ID NO: 1086 - RNA, 19 nt, synthetic construct
  source 1..19: mol_type = other RNA
tggggccaccagttcgaga

SEQ ID NO: 1087 - RNA, 19 nt, synthetic construct
  source 1..19: mol_type = other RNA
ttcgagggggcggaggaat

SEQ ID NO: 1088 - RNA, 19 nt, synthetic construct
  source 1..19: mol_type = other RNA
cggaggaatatgccagctt

SEQ ID NO: 1089 - RNA, 19 nt, synthetic construct
  source 1..19: mol_type = other RNA
cagcttcctgcaggaggca

SEQ ID NO: 1090 - RNA, 19 nt, synthetic construct
  source 1..19: mol_type = other RNA
aggaggcgcaggtaccgtt

SEQ ID NO: 1091 - RNA, 19 nt, synthetic construct
  source 1..19: mol_type = other RNA
aggtaccgttcctctccct

SEQ ID NO: 1092 - RNA, 19 nt, synthetic construct
  source 1..19: mol_type = other RNA
ctctccctggagcgctgct

SEQ ID NO: 1093 - RNA, 19 nt, synthetic construct
  source 1..19: mol_type = other RNA
cgctgctcagccccggaca

SEQ ID NO: 1094 - RNA, 19 nt, synthetic construct
  source 1..19: mol_type = other RNA
ccggacgtgcacggatcct

SEQ ID NO: 1095 - RNA, 19 nt, synthetic construct
  source 1..19: mol_type = other RNA
cggatcctccatcctccca

SEQ ID NO: 1096 - RNA, 19 nt, synthetic construct
  source 1..19: mol_type = other RNA
catcctccccggcatgcta

SEQ ID NO: 1097 - RNA, 19 nt, synthetic construct
  source 1..19: mol_type = other RNA
catgctctgcgcagggtta

SEQ ID NO: 1098 - RNA, 19 nt, synthetic construct
  source 1..19: mol_type = other RNA
agggttcctcgagggcgga

SEQ ID NO: 1099 - RNA, 19 nt, synthetic construct
  source 1..19: mol_type = other RNA
gagggcggcaccgatgcgt

SEQ ID NO: 1100 - RNA, 19 nt, synthetic construct
  source 1..19: mol_type = other RNA
gatgcgtgccagggtgatt

SEQ ID NO: 1101 - RNA, 19 nt, synthetic construct
  source 1..19: mol_type = other RNA
agggtgattccggaggcca

SEQ ID NO: 1102 - RNA, 19 nt, synthetic construct
  source 1..19: mol_type = other RNA
cggaggcccgctggtgtgt

SEQ ID NO: 1103 - RNA, 19 nt, synthetic construct
  source 1..19: mol_type = other RNA
ggtgtgtgaggaccaagct

SEQ ID NO: 1104 - RNA, 19 nt, synthetic construct
  source 1..19: mol_type = other RNA
ccaagctgcagagcgccga

SEQ ID NO: 1105 - RNA, 19 nt, synthetic construct
  source 1..19: mol_type = other RNA
agagcgccggctcacccta

SEQ ID NO: 1106 - RNA, 19 nt, synthetic construct
  source 1..19: mol_type = other RNA
tcaccctgcaaggcatcat

SEQ ID NO: 1107 - RNA, 19 nt, synthetic construct
  source 1..19: mol_type = other RNA
ggcatcatcagctggggat

SEQ ID NO: 1108 - RNA, 19 nt, synthetic construct
  source 1..19: mol_type = other RNA
ctggggatcgggctgtggt

SEQ ID NO: 1109 - RNA, 19 nt, synthetic construct
  source 1..19: mol_type = other RNA
tgtggtgaccgcaacaaga

SEQ ID NO: 1110 - RNA, 19 nt, synthetic construct
  source 1..19: mol_type = other RNA
caacaagccaggcgtctaa

SEQ ID NO: 1111 - RNA, 19 nt, synthetic construct
  source 1..19: mol_type = other RNA
aggcgtctacaccgatgta

SEQ ID NO: 1112 - RNA, 19 nt, synthetic construct
  source 1..19: mol_type = other RNA
gatgtggcctactacctga

SEQ ID NO: 1113 - RNA, 19 nt, synthetic construct
  source 1..19: mol_type = other RNA
tactacctggcctggatca

SEQ ID NO: 1114 - RNA, 19 nt, synthetic construct
  source 1..19: mol_type = other RNA
ctggatccgggagcacaca

SEQ ID NO: 1115 - RNA, 19 nt, synthetic construct
  source 1..19: mol_type = other RNA
agcacaccgtttcctgatt

SEQ ID NO: 1116 - RNA, 19 nt, synthetic construct
  source 1..19: mol_type = other RNA
tcctgattgctcagggact

SEQ ID NO: 1117 - RNA, 19 nt, synthetic construct
  source 1..19: mol_type = other RNA
cagggactcatctttccct

SEQ ID NO: 1118 - RNA, 19 nt, synthetic construct
  source 1..19: mol_type = other RNA
tttccctccttggtgatta

SEQ ID NO: 1119 - RNA, 19 nt, synthetic construct
  source 1..19: mol_type = other RNA
tggtgattccgcagtgaga

SEQ ID NO: 1120 - RNA, 19 nt, synthetic construct
  source 1..19: mol_type = other RNA
agtgagagagtggctggga

SEQ ID NO: 1121 - RNA, 19 nt, synthetic construct
  source 1..19: mol_type = other RNA
gctggggcatggaaggcaa

SEQ ID NO: 1122 - RNA, 19 nt, synthetic construct
  source 1..19: mol_type = other RNA
tggaaggcaagattgtgta

SEQ ID NO: 1123 - RNA, 19 nt, synthetic construct
  source 1..19: mol_type = other RNA
ttgtgtcccattcccccaa

SEQ ID NO: 1124 - RNA, 19 nt, synthetic construct
  source 1..19: mol_type = other RNA
tcccccagtgcggccagct

SEQ ID NO: 1125 - RNA, 19 nt, synthetic construct
  source 1..19: mol_type = other RNA
gccagctccgcgccaggat

SEQ ID NO: 1126 - RNA, 19 nt, synthetic construct
  source 1..19: mol_type = other RNA
gccaggatggcgcaggaaa

SEQ ID NO: 1127 - RNA, 19 nt, synthetic construct
  source 1..19: mol_type = other RNA
gcaggaactcaataaagta

SEQ ID NO: 1128 - RNA, 19 nt, synthetic construct
  source 1..19: mol_type = other RNA
aataaagtgctttgaaaat

SEQ ID NO: 1129 - RNA, 19 nt, synthetic construct
  source 1..19: mol_type = other RNA
ttgaaaatgctgagaaaaa

SEQ ID NO: 1130 - RNA, 19 nt, synthetic construct
  source 1..19: mol_type = other RNA
agctgcctatccaggagtc

SEQ ID NO: 1131 - RNA, 19 nt, synthetic construct
  source 1..19: mol_type = other RNA
tcgttggtccagctgccta

SEQ ID NO: 1132 - RNA, 19 nt, synthetic construct
  source 1..19: mol_type = other RNA
atggcatccgtccgttggt

SEQ ID NO: 1133 - RNA, 19 nt, synthetic construct
  source 1..19: mol_type = other RNA
agcagagccctcatggcat

SEQ ID NO: 1134 - RNA, 19 nt, synthetic construct
  source 1..19: mol_type = other RNA
accccaggagcagcagagc

SEQ ID NO: 1135 - RNA, 19 nt, synthetic construct
  source 1..19: mol_type = other RNA
accagcaggaaccccagga

SEQ ID NO: 1136 - RNA, 19 nt, synthetic construct
  source 1..19: mol_type = other RNA
actccaagctcaccagcag

SEQ ID NO: 1137 - RNA, 19 nt, synthetic construct
  source 1..19: mol_type = other RNA
tgaaagtgttgactccaag

SEQ ID NO: 1138 - RNA, 19 nt, synthetic construct
  source 1..19: mol_type = other RNA
tcaaggtggaatcgaaagt

SEQ ID NO: 1139 - RNA, 19 nt, synthetic construct
  source 1..19: mol_type = other RNA
tgggggcttcccaaggtgg

SEQ ID NO: 1140 - RNA, 19 nt, synthetic construct
  source 1..19: mol_type = other RNA
acttatgctccttgggggc

SEQ ID NO: 1141 - RNA, 19 nt, synthetic construct
  source 1..19: mol_type = other RNA
tttcagctttgtacttatg

SEQ ID NO: 1142 - RNA, 19 nt, synthetic construct
  source 1..19: mol_type = other RNA
actgtgtgctcttcagctt

SEQ ID NO: 1143 - RNA, 19 nt, synthetic construct
  source 1..19: mol_type = other RNA
acagtgagaacgactgtgt

SEQ ID NO: 1144 - RNA, 19 nt, synthetic construct
  source 1..19: mol_type = other RNA
tccccggtgacagtgagaa

SEQ ID NO: 1145 - RNA, 19 nt, synthetic construct
  source 1..19: mol_type = other RNA
agtggcagggctccccggt

SEQ ID NO: 1146 - RNA, 19 nt, synthetic construct
  source 1..19: mol_type = other RNA
actggaaggggaagtggca

SEQ ID NO: 1147 - RNA, 19 nt, synthetic construct
  source 1..19: mol_type = other RNA
tctgccggtggtactggaa

SEQ ID NO: 1148 - RNA, 19 nt, synthetic construct
  source 1..19: mol_type = other RNA
ttgtggtacagctgccggt

SEQ ID NO: 1149 - RNA, 19 nt, synthetic construct
  source 1..19: mol_type = other RNA
tgtgggtacatttgtggta

SEQ ID NO: 1150 - RNA, 19 nt, synthetic construct
  source 1..19: mol_type = other RNA
tggccggcccttgtgggta

SEQ ID NO: 1151 - RNA, 19 nt, synthetic construct
  source 1..19: mol_type = other RNA
tgctgagggcctggccggc

SEQ ID NO: 1152 - RNA, 19 nt, synthetic construct
  source 1..19: mol_type = other RNA
ttagcacaccagggctgag

SEQ ID NO: 1153 - RNA, 19 nt, synthetic construct
  source 1..19: mol_type = other RNA
agttgggggtggtagcaca

SEQ ID NO: 1154 - RNA, 19 nt, synthetic construct
  source 1..19: mol_type = other RNA
tctgatcaaagttgggggt

SEQ ID NO: 1155 - RNA, 19 nt, synthetic construct
  source 1..19: mol_type = other RNA
tcccatcgctggtcctgat

SEQ ID NO: 1156 - RNA, 19 nt, synthetic construct
  source 1..19: mol_type = other RNA
aaacagtatccccatcgct

SEQ ID NO: 1157 - RNA, 19 nt, synthetic construct
  source 1..19: mol_type = other RNA
tcttgggctccaaacagta

SEQ ID NO: 1158 - RNA, 19 nt, synthetic construct
  source 1..19: mol_type = other RNA
tggtctttcactttcttgg

SEQ ID NO: 1159 - RNA, 19 nt, synthetic construct
  source 1..19: mol_type = other RNA
gtttgctgcagtggtcttt

SEQ ID NO: 1160 - RNA, 19 nt, synthetic construct
  source 1..19: mol_type = other RNA
aggggctgtgtttgctgca

SEQ ID NO: 1161 - RNA, 19 nt, synthetic construct
  source 1..19: mol_type = other RNA
ttcctttctggcaggggct

SEQ ID NO: 1162 - RNA, 19 nt, synthetic construct
  source 1..19: mol_type = other RNA
acacaggtccctcctttct

SEQ ID NO: 1163 - RNA, 19 nt, synthetic construct
  source 1..19: mol_type = other RNA
ttggcatgttcacacaggt

SEQ ID NO: 1164 - RNA, 19 nt, synthetic construct
  source 1..19: mol_type = other RNA
agtgggggccgcttggcat

SEQ ID NO: 1165 - RNA, 19 nt, synthetic construct
  source 1..19: mol_type = other RNA
tgacagagacagtgggggc

SEQ ID NO: 1166 - RNA, 19 nt, synthetic construct
  source 1..19: mol_type = other RNA
agtggtttccagtgaggtg

SEQ ID NO: 1167 - RNA, 19 nt, synthetic construct
  source 1..19: mol_type = other RNA
tctctttctggcagtggtt

SEQ ID NO: 1168 - RNA, 19 nt, synthetic construct
  source 1..19: mol_type = other RNA
taaagcacttctctttctg

SEQ ID NO: 1169 - RNA, 19 nt, synthetic construct
  source 1..19: mol_type = other RNA
taagctgaggctcaaagca

SEQ ID NO: 1170 - RNA, 19 nt, synthetic construct
  source 1..19: mol_type = other RNA
tgaaaaaccggagaagctg

SEQ ID NO: 1171 - RNA, 19 nt, synthetic construct
  source 1..19: mol_type = other RNA
tattcttgtggaaaaaccg

SEQ ID NO: 1172 - RNA, 19 nt, synthetic construct
  source 1..19: mol_type = other RNA
ataccatatctcattcttg

SEQ ID NO: 1173 - RNA, 19 nt, synthetic construct
  source 1..19: mol_type = other RNA
tgctcagttctataccata

SEQ ID NO: 1174 - RNA, 19 nt, synthetic construct
  source 1..19: mol_type = other RNA
tgccacagctgcttgctca

SEQ ID NO: 1175 - RNA, 19 nt, synthetic construct
  source 1..19: mol_type = other RNA
actggcatctggccacagc

SEQ ID NO: 1176 - RNA, 19 nt, synthetic construct
  source 1..19: mol_type = other RNA
aggacccttgcactggcat

SEQ ID NO: 1177 - RNA, 19 nt, synthetic construct
  source 1..19: mol_type = other RNA
agtgggcatcaggaccctt

SEQ ID NO: 1178 - RNA, 19 nt, synthetic construct
  source 1..19: mol_type = other RNA
tagccgctggcagtgggca

SEQ ID NO: 1179 - RNA, 19 nt, synthetic construct
  source 1..19: mol_type = other RNA
aggcctggctggccagccg

SEQ ID NO: 1180 - RNA, 19 nt, synthetic construct
  source 1..19: mol_type = other RNA
tggtgcggcaggcctggct

SEQ ID NO: 1181 - RNA, 19 nt, synthetic construct
  source 1..19: mol_type = other RNA
tgaggcacgggttggtgcg

SEQ ID NO: 1182 - RNA, 19 nt, synthetic construct
  source 1..19: mol_type = other RNA
agcgacccccatggaggca

SEQ ID NO: 1183 - RNA, 19 nt, synthetic construct
  source 1..19: mol_type = other RNA
acctctaggcagcgacccc

SEQ ID NO: 1184 - RNA, 19 nt, synthetic construct
  source 1..19: mol_type = other RNA
tgtggccctccacctctag

SEQ ID NO: 1185 - RNA, 19 nt, synthetic construct
  source 1..19: mol_type = other RNA
tggcacaggcggtggccct

SEQ ID NO: 1186 - RNA, 19 nt, synthetic construct
  source 1..19: mol_type = other RNA
tccaccgggcagtggcaca

SEQ ID NO: 1187 - RNA, 19 nt, synthetic construct
  source 1..19: mol_type = other RNA
tctccggtgtagcccaccg

SEQ ID NO: 1188 - RNA, 19 nt, synthetic construct
  source 1..19: mol_type = other RNA
tgtcgcagaaggctccggt

SEQ ID NO: 1189 - RNA, 19 nt, synthetic construct
  source 1..19: mol_type = other RNA
tggtgtccacgtcgcagaa

SEQ ID NO: 1190 - RNA, 19 nt, synthetic construct
  source 1..19: mol_type = other RNA
agcagcttgccttggtgtc

SEQ ID NO: 1191 - RNA, 19 nt, synthetic construct
  source 1..19: mol_type = other RNA
tggccatcatagcagcttg

SEQ ID NO: 1192 - RNA, 19 nt, synthetic construct
  source 1..19: mol_type = other RNA
agctgagcccgcggccatc

SEQ ID NO: 1193 - RNA, 19 nt, synthetic construct
  source 1..19: mol_type = other RNA
tccaggccgcggtagctga

SEQ ID NO: 1194 - RNA, 19 nt, synthetic construct
  source 1..19: mol_type = other RNA
tgtggtcctggccaggccg

SEQ ID NO: 1195 - RNA, 19 nt, synthetic construct
  source 1..19: mol_type = other RNA
tacccgagagcgtggtcct

SEQ ID NO: 1196 - RNA, 19 nt, synthetic construct
  source 1..19: mol_type = other RNA
tctgacagggcgcacccga

SEQ ID NO: 1197 - RNA, 19 nt, synthetic construct
  source 1..19: mol_type = other RNA
tgaggcccacggctgacag

SEQ ID NO: 1198 - RNA, 19 nt, synthetic construct
  source 1..19: mol_type = other RNA
aggtggcctccgaggccca

SEQ ID NO: 1199 - RNA, 19 nt, synthetic construct
  source 1..19: mol_type = other RNA
ttcacgttccggtaggtgg

SEQ ID NO: 1200 - RNA, 19 nt, synthetic construct
  source 1..19: mol_type = other RNA
tttgctcggcagtcacgtt

SEQ ID NO: 1201 - RNA, 19 nt, synthetic construct
  source 1..19: mol_type = other RNA
tcagttccgcgcttgctcg

SEQ ID NO: 1202 - RNA, 19 nt, synthetic construct
  source 1..19: mol_type = other RNA
tgcccagtccccagttccg

SEQ ID NO: 1203 - RNA, 19 nt, synthetic construct
  source 1..19: mol_type = other RNA
aaggcgtggccgcccagtc

SEQ ID NO: 1204 - RNA, 19 nt, synthetic construct
  source 1..19: mol_type = other RNA
tggttccggcagaaggcgt

SEQ ID NO: 1205 - RNA, 19 nt, synthetic construct
  source 1..19: mol_type = other RNA
tgtcgttgtccgggttccg

SEQ ID NO: 1206 - RNA, 19 nt, synthetic construct
  source 1..19: mol_type = other RNA
accacgggcggatgtcgtt

SEQ ID NO: 1207 - RNA, 19 nt, synthetic construct
  source 1..19: mol_type = other RNA
agcacgaagcaccacgggc

SEQ ID NO: 1208 - RNA, 19 nt, synthetic construct
  source 1..19: mol_type = other RNA
tgtcgcggttcagcacgaa

SEQ ID NO: 1209 - RNA, 19 nt, synthetic construct
  source 1..19: mol_type = other RNA
tagctcagccggtcgcggt

SEQ ID NO: 1210 - RNA, 19 nt, synthetic construct
  source 1..19: mol_type = other RNA
tgcagtactcccagctcag

SEQ ID NO: 1211 - RNA, 19 nt, synthetic construct
  source 1..19: mol_type = other RNA
actgtgccaggtcgcagta

SEQ ID NO: 1212 - RNA, 19 nt, synthetic construct
  source 1..19: mol_type = other RNA
tgggtctggcactgtgcca

SEQ ID NO: 1213 - RNA, 19 nt, synthetic construct
  source 1..19: mol_type = other RNA
tccgcctgggttggggtct

SEQ ID NO: 1214 - RNA, 19 nt, synthetic construct
  source 1..19: mol_type = other RNA
tgggtcggaggcgccgcct

SEQ ID NO: 1215 - RNA, 19 nt, synthetic construct
  source 1..19: mol_type = other RNA
aggggacaccggggtcgga

SEQ ID NO: 1216 - RNA, 19 nt, synthetic construct
  source 1..19: mol_type = other RNA
acatgaagcctaggggaca

SEQ ID NO: 1217 - RNA, 19 nt, synthetic construct
  source 1..19: mol_type = other RNA
tgcatgagtgggacatgaa

SEQ ID NO: 1218 - RNA, 19 nt, synthetic construct
  source 1..19: mol_type = other RNA
tggctgcgcgggcatgagt

SEQ ID NO: 1219 - RNA, 19 nt, synthetic construct
  source 1..19: mol_type = other RNA
ttcggcggtgccggctgcg

SEQ ID NO: 1220 - RNA, 19 nt, synthetic construct
  source 1..19: mol_type = other RNA
tggctgaggcttcggcggt

SEQ ID NO: 1221 - RNA, 19 nt, synthetic construct
  source 1..19: mol_type = other RNA
tgtccgggtcgtgggctga

SEQ ID NO: 1222 - RNA, 19 nt, synthetic construct
  source 1..19: mol_type = other RNA
actgaggcggggtccgggt

SEQ ID NO: 1223 - RNA, 19 nt, synthetic construct
  source 1..19: mol_type = other RNA
tcggggtctgggactgagg

SEQ ID NO: 1224 - RNA, 19 nt, synthetic construct
  source 1..19: mol_type = other RNA
tgcaaggctcccggggtct

SEQ ID NO: 1225 - RNA, 19 nt, synthetic construct
  source 1..19: mol_type = other RNA
tcccgcttcgccggcaagg

SEQ ID NO: 1226 - RNA, 19 nt, synthetic construct
  source 1..19: mol_type = other RNA
aaggcggctgctcccgctt

SEQ ID NO: 1227 - RNA, 19 nt, synthetic construct
  source 1..19: mol_type = other RNA
ttggtcagggaaggcggct

SEQ ID NO: 1228 - RNA, 19 nt, synthetic construct
  source 1..19: mol_type = other RNA
agtgggccgttcctggtca

SEQ ID NO: 1229 - RNA, 19 nt, synthetic construct
  source 1..19: mol_type = other RNA
tccgcagctcagtgggccg

SEQ ID NO: 1230 - RNA, 19 nt, synthetic construct
  source 1..19: mol_type = other RNA
tgcggagccgctgcccgca

SEQ ID NO: 1231 - RNA, 19 nt, synthetic construct
  source 1..19: mol_type = other RNA
acagactcttgcggagccg

SEQ ID NO: 1232 - RNA, 19 nt, synthetic construct
  source 1..19: mol_type = other RNA
tggtcatcgaagacagact

SEQ ID NO: 1233 - RNA, 19 nt, synthetic construct
  source 1..19: mol_type = other RNA
tcaacgacgcgggtcatcg

SEQ ID NO: 1234 - RNA, 19 nt, synthetic construct
  source 1..19: mol_type = other RNA
tccaccagcccgccaacga

SEQ ID NO: 1235 - RNA, 19 nt, synthetic construct
  source 1..19: mol_type = other RNA
tccccgcgtagcgccacca

SEQ ID NO: 1236 - RNA, 19 nt, synthetic construct
  source 1..19: mol_type = other RNA
taggggtgcgccccgcgta

SEQ ID NO: 1237 - RNA, 19 nt, synthetic construct
  source 1..19: mol_type = other RNA
agcgcggcgatgtaggggt

SEQ ID NO: 1238 - RNA, 19 nt, synthetic construct
  source 1..19: mol_type = other RNA
tgccccagtacagcgcggc

SEQ ID NO: 1239 - RNA, 19 nt, synthetic construct
  source 1..19: mol_type = other RNA
tcagaaactgtggccccag

SEQ ID NO: 1240 - RNA, 19 nt, synthetic construct
  source 1..19: mol_type = other RNA
taggctgccggcgcagaaa

SEQ ID NO: 1241 - RNA, 19 nt, synthetic construct
  source 1..19: mol_type = other RNA
tggggcgatgaggctgccg

SEQ ID NO: 1242 - RNA, 19 nt, synthetic construct
  source 1..19: mol_type = other RNA
agcacccagcagggggcga

SEQ ID NO: 1243 - RNA, 19 nt, synthetic construct
  source 1..19: mol_type = other RNA
tagcggccgtcagcaccca

SEQ ID NO: 1244 - RNA, 19 nt, synthetic construct
  source 1..19: mol_type = other RNA
tctgcaggcagtgagcggc

SEQ ID NO: 1245 - RNA, 19 nt, synthetic construct
  source 1..19: mol_type = other RNA
ttgcgggccggtcctgcag

SEQ ID NO: 1246 - RNA, 19 nt, synthetic construct
  source 1..19: mol_type = other RNA
agatcctcgggtgcgggcc

SEQ ID NO: 1247 - RNA, 19 nt, synthetic construct
  source 1..19: mol_type = other RNA
taccaccgtcagatcctcg

SEQ ID NO: 1248 - RNA, 19 nt, synthetic construct
  source 1..19: mol_type = other RNA
tttcctggccgagcaccac

SEQ ID NO: 1249 - RNA, 19 nt, synthetic construct
  source 1..19: mol_type = other RNA
tggttacggcgttcctggc

SEQ ID NO: 1250 - RNA, 19 nt, synthetic construct
  source 1..19: mol_type = other RNA
tctcacagctgtggttacg

SEQ ID NO: 1251 - RNA, 19 nt, synthetic construct
  source 1..19: mol_type = other RNA
acgtctggcacggctcaca

SEQ ID NO: 1252 - RNA, 19 nt, synthetic construct
  source 1..19: mol_type = other RNA
tcacggccaacgtctggca

SEQ ID NO: 1253 - RNA, 19 nt, synthetic construct
  source 1..19: mol_type = other RNA
agcggtaggagcgcacggc

SEQ ID NO: 1254 - RNA, 19 nt, synthetic construct
  source 1..19: mol_type = other RNA
aggcctcgtgcaagcggta

SEQ ID NO: 1255 - RNA, 19 nt, synthetic construct
  source 1..19: mol_type = other RNA
acgggcgagaaggcctcgt

SEQ ID NO: 1256 - RNA, 19 nt, synthetic construct
  source 1..19: mol_type = other RNA
tctggtagctgacgggcga

SEQ ID NO: 1257 - RNA, 19 nt, synthetic construct
  source 1..19: mol_type = other RNA
agccaggtcgtgctggtag

SEQ ID NO: 1258 - RNA, 19 nt, synthetic construct
  source 1..19: mol_type = other RNA
aggcgcaacagagccaggt

SEQ ID NO: 1259 - RNA, 19 nt, synthetic construct
  source 1..19: mol_type = other RNA
tatcctcctgaaggcgcaa

SEQ ID NO: 1260 - RNA, 19 nt, synthetic construct
  source 1..19: mol_type = other RNA
agctgccgtccgcatcctc

SEQ ID NO: 1261 - RNA, 19 nt, synthetic construct
  source 1..19: mol_type = other RNA
aggagcgcgcagctgccgt

SEQ ID NO: 1262 - RNA, 19 nt, synthetic construct
  source 1..19: mol_type = other RNA
acgtaaggcgacaggagcg

SEQ ID NO: 1263 - RNA, 19 nt, synthetic construct
  source 1..19: mol_type = other RNA
acaccggctgaacgtaagg

SEQ ID NO: 1264 - RNA, 19 nt, synthetic construct
  source 1..19: mol_type = other RNA
tttggcaggcacaccggct

SEQ ID NO: 1265 - RNA, 19 nt, synthetic construct
  source 1..19: mol_type = other RNA
tgcgcggcgccgcttggca

SEQ ID NO: 1266 - RNA, 19 nt, synthetic construct
  source 1..19: mol_type = other RNA
tcggagggtcgcgcggcgc

SEQ ID NO: 1267 - RNA, 19 nt, synthetic construct
  source 1..19: mol_type = other RNA
agagcgtggtctcggaggg

SEQ ID NO: 1268 - RNA, 19 nt, synthetic construct
  source 1..19: mol_type = other RNA
tcggccacctggcagagcg

SEQ ID NO: 1269 - RNA, 19 nt, synthetic construct
  source 1..19: mol_type = other RNA
tggccccagccggccacct

SEQ ID NO: 1270 - RNA, 19 nt, synthetic construct
  source 1..19: mol_type = other RNA
tctcgaactggtggcccca

SEQ ID NO: 1271 - RNA, 19 nt, synthetic construct
  source 1..19: mol_type = other RNA
attcctccgccccctcgaa

SEQ ID NO: 1272 - RNA, 19 nt, synthetic construct
  source 1..19: mol_type = other RNA
aagctggcatattcctccg

SEQ ID NO: 1273 - RNA, 19 nt, synthetic construct
  source 1..19: mol_type = other RNA
tgcctcctgcaggaagctg

SEQ ID NO: 1274 - RNA, 19 nt, synthetic construct
  source 1..19: mol_type = other RNA
aacggtacctgcgcctcct

SEQ ID NO: 1275 - RNA, 19 nt, synthetic construct
  source 1..19: mol_type = other RNA
agggagaggaacggtacct

SEQ ID NO: 1276 - RNA, 19 nt, synthetic construct
  source 1..19: mol_type = other RNA
agcagcgctccagggagag

SEQ ID NO: 1277 - RNA, 19 nt, synthetic construct
  source 1..19: mol_type = other RNA
tgtccggggctgagcagcg

SEQ ID NO: 1278 - RNA, 19 nt, synthetic construct
  source 1..19: mol_type = other RNA
aggatccgtgcacgtccgg

SEQ ID NO: 1279 - RNA, 19 nt, synthetic construct
  source 1..19: mol_type = other RNA
tgggaggatggaggatccg

SEQ ID NO: 1280 - RNA, 19 nt, synthetic construct
  source 1..19: mol_type = other RNA
tagcatgccggggaggatg

SEQ ID NO: 1281 - RNA, 19 nt, synthetic construct
  source 1..19: mol_type = other RNA
taaccctgcgcagagcatg

SEQ ID NO: 1282 - RNA, 19 nt, synthetic construct
  source 1..19: mol_type = other RNA
tccgccctcgaggaaccct

SEQ ID NO: 1283 - RNA, 19 nt, synthetic construct
  source 1..19: mol_type = other RNA
acgcatcggtgccgccctc

SEQ ID NO: 1284 - RNA, 19 nt, synthetic construct
  source 1..19: mol_type = other RNA
aatcaccctggcacgcatc

SEQ ID NO: 1285 - RNA, 19 nt, synthetic construct
  source 1..19: mol_type = other RNA
tggcctccggaatcaccct

SEQ ID NO: 1286 - RNA, 19 nt, synthetic construct
  source 1..19: mol_type = other RNA
acacaccagcgggcctccg

SEQ ID NO: 1287 - RNA, 19 nt, synthetic construct
  source 1..19: mol_type = other RNA
agcttggtcctcacacacc

SEQ ID NO: 1288 - RNA, 19 nt, synthetic construct
  source 1..19: mol_type = other RNA
tcggcgctctgcagcttgg

SEQ ID NO: 1289 - RNA, 19 nt, synthetic construct
  source 1..19: mol_type = other RNA
tagggtgagccggcgctct

SEQ ID NO: 1290 - RNA, 19 nt, synthetic construct
  source 1..19: mol_type = other RNA
atgatgccttgcagggtga

SEQ ID NO: 1291 - RNA, 19 nt, synthetic construct
  source 1..19: mol_type = other RNA
atccccagctgatgatgcc

SEQ ID NO: 1292 - RNA, 19 nt, synthetic construct
  source 1..19: mol_type = other RNA
accacagcccgatccccag

SEQ ID NO: 1293 - RNA, 19 nt, synthetic construct
  source 1..19: mol_type = other RNA
tcttgttgcggtcaccaca

SEQ ID NO: 1294 - RNA, 19 nt, synthetic construct
  source 1..19: mol_type = other RNA
ttagacgcctggcttgttg

SEQ ID NO: 1295 - RNA, 19 nt, synthetic construct
  source 1..19: mol_type = other RNA
tacatcggtgtagacgcct

SEQ ID NO: 1296 - RNA, 19 nt, synthetic construct
  source 1..19: mol_type = other RNA
tcaggtagtaggccacatc

SEQ ID NO: 1297 - RNA, 19 nt, synthetic construct
  source 1..19: mol_type = other RNA
tgatccaggccaggtagta

SEQ ID NO: 1298 - RNA, 19 nt, synthetic construct
  source 1..19: mol_type = other RNA
tgtgtgctcccggatccag

SEQ ID NO: 1299 - RNA, 19 nt, synthetic construct
  source 1..19: mol_type = other RNA
aatcaggaaacggtgtgct

SEQ ID NO: 1300 - RNA, 19 nt, synthetic construct
  source 1..19: mol_type = other RNA
agtccctgagcaatcagga

SEQ ID NO: 1301 - RNA, 19 nt, synthetic construct
  source 1..19: mol_type = other RNA
agggaaagatgagtccctg

SEQ ID NO: 1302 - RNA, 19 nt, synthetic construct
  source 1..19: mol_type = other RNA
taatcaccaaggagggaaa

SEQ ID NO: 1303 - RNA, 19 nt, synthetic construct
  source 1..19: mol_type = other RNA
tctcactgcggaatcacca

SEQ ID NO: 1304 - RNA, 19 nt, synthetic construct
  source 1..19: mol_type = other RNA
tcccagccactctctcact

SEQ ID NO: 1305 - RNA, 19 nt, synthetic construct
  source 1..19: mol_type = other RNA
ttgccttccatgccccagc

SEQ ID NO: 1306 - RNA, 19 nt, synthetic construct
  source 1..19: mol_type = other RNA
tacacaatcttgccttcca

SEQ ID NO: 1307 - RNA, 19 nt, synthetic construct
  source 1..19: mol_type = other RNA
ttgggggaatgggacacaa

SEQ ID NO: 1308 - RNA, 19 nt, synthetic construct
  source 1..19: mol_type = other RNA
agctggccgcactggggga

SEQ ID NO: 1309 - RNA, 19 nt, synthetic construct
  source 1..19: mol_type = other RNA
atcctggcgcggagctggc

SEQ ID NO: 1310 - RNA, 19 nt, synthetic construct
  source 1..19: mol_type = other RNA
tttcctgcgccatcctggc

SEQ ID NO: 1311 - RNA, 19 nt, synthetic construct
  source 1..19: mol_type = other RNA
tactttattgagttcctgc

SEQ ID NO: 1312 - RNA, 19 nt, synthetic construct
  source 1..19: mol_type = other RNA
attttcaaagcactttatt

SEQ ID NO: 1313 - RNA, 19 nt, synthetic construct
  source 1..19: mol_type = other RNA
tttttctcagcattttcaa

SEQ ID NO: 1314 - DNA, 21 bp, synthetic construct
  source 1..21: mol_type = other DNA
  modified_base 1: mod_base = OTHER; note = guanosine-3'-phosphate
  modified_base 2: mod_base = OTHER; note = adenosine-3'-phosphate
  modified_base 3: mod_base = OTHER; note = cytidine-3'-phosphate
  modified_base 4: mod_base = OTHER; note = uridine-3'-phosphate
  modified_base 5: mod_base = OTHER; note = cytidine-3'-phosphate
  modified_base 6: mod_base = OTHER; note = cytidine-3'-phosphate
  modified_base 7: mod_base = OTHER; note = uridine-3'-phosphate
  modified_base 8: mod_base = OTHER; note = guanosine-3'-phosphate
  modified_base 9: mod_base = OTHER; note = guanosine-3'-phosphate
  modified_base 10: mod_base = OTHER; note = adenosine-3'-phosphate
  modified_base 11: mod_base = OTHER; note = uridine-3'-phosphate
  modified_base 12: mod_base = OTHER; note = adenosine-3'-phosphate
  modified_base 13: mod_base = OTHER; note = guanosine-3'-phosphate
  modified_base 14: mod_base = OTHER; note = guanosine-3'-phosphate
  modified_base 15: mod_base = OTHER; note = cytidine-3'-phosphate
  modified_base 16: mod_base = OTHER; note = adenosine-3'-phosphate
  modified_base 17: mod_base = OTHER; note = guanosine-3'-phosphate
  modified_base 18: mod_base = OTHER; note = cytidine-3'-phosphate
  modified_base 19: mod_base = OTHER; note = uridine-3'-phosphate
  misc_feature 1..19: note = RNA
  misc_feature 20..21: note = DNA
gactcctggataggcagcttt

SEQ ID NO: 1315 - DNA, 21 bp, synthetic construct
  source 1..21: mol_type = other DNA
  modified_base 1: mod_base = OTHER; note = uridine-3'-phosphate
  modified_base 2: mod_base = OTHER; note = adenosine-3'-phosphate
  modified_base 3: mod_base = OTHER; note = guanosine-3'-phosphate
  modified_base 4: mod_base = OTHER; note = guanosine-3'-phosphate
  modified_base 5: mod_base = OTHER; note = cytidine-3'-phosphate
  modified_base 6: mod_base = OTHER; note = adenosine-3'-phosphate
  modified_base 7: mod_base = OTHER; note = guanosine-3'-phosphate
  modified_base 8: mod_base = OTHER; note = cytidine-3'-phosphate
  modified_base 9: mod_base = OTHER; note = uridine-3'-phosphate
  modified_base 10: mod_base = OTHER; note = guanosine-3'-phosphate
  modified_base 11: mod_base = OTHER; note = guanosine-3'-phosphate
  modified_base 12: mod_base = OTHER; note = adenosine-3'-phosphate
  modified_base 13: mod_base = OTHER; note = cytidine-3'-phosphate
  modified_base 14: mod_base = OTHER; note = cytidine-3'-phosphate
  modified_base 15: mod_base = OTHER; note = adenosine-3'-phosphate
  modified_base 16: mod_base = OTHER; note = adenosine-3'-phosphate
  modified_base 17: mod_base = OTHER; note = cytidine-3'-phosphate
  modified_base 18: mod_base = OTHER; note = guanosine-3'-phosphate
  modified_base 19: mod_base = OTHER; note = adenosine-3'-phosphate
  misc_feature 1..19: note = RNA
  misc_feature 20..21: note = DNA
taggcagctggaccaacgatt

SEQ ID NO: 1316 - DNA, 21 bp, synthetic construct
  source 1..21: mol_type = other DNA
  modified_base 1: mod_base = OTHER; note = adenosine-3'-phosphate
  modified_base 2: mod_base = OTHER; note = cytidine-3'-phosphate
  modified_base 3: mod_base = OTHER; note = cytidine-3'-phosphate
  modified_base 4: mod_base = OTHER; note = adenosine-3'-phosphate
  modified_base 5: mod_base = OTHER; note = adenosine-3'-phosphate
  modified_base 6: mod_base = OTHER; note = cytidine-3'-phosphate
  modified_base 7: mod_base = OTHER; note = guanosine-3'-phosphate
  modified_base 8: mod_base = OTHER; note = guanosine-3'-phosphate
  modified_base 9: mod_base = OTHER; note = adenosine-3'-phosphate
  modified_base 10: mod_base = OTHER; note = cytidine-3'-phosphate
  modified_base 11: mod_base = OTHER; note = guanosine-3'-phosphate
  modified_base 12: mod_base = OTHER; note = guanosine-3'-phosphate
  modified_base 13: mod_base = OTHER; note = adenosine-3'-phosphate
  modified_base 14: mod_base = OTHER; note = uridine-3'-phosphate
  modified_base 15: mod_base = OTHER; note = guanosine-3'-phosphate
  modified_base 16: mod_base = OTHER; note = cytidine-3'-phosphate
  modified_base 17: mod_base = OTHER; note = cytidine-3'-phosphate
  modified_base 18: mod_base = OTHER; note = adenosine-3'-phosphate
  modified_base 19: mod_base = OTHER; note = uridine-3'-phosphate
  misc_feature 1..19: note = RNA
  misc_feature 20..21: note = DNA
accaacggacggatgccattt

SEQ ID NO: 1317 - DNA, 21 bp, synthetic construct
  source 1..21: mol_type = other DNA
  modified_base 1: mod_base = OTHER; note = adenosine-3'-phosphate
  modified_base 2: mod_base = OTHER; note = uridine-3'-phosphate
  modified_base 3: mod_base = OTHER; note = guanosine-3'-phosphate
  modified_base 4: mod_base = OTHER; note = cytidine-3'-phosphate
  modified_base 5: mod_base = OTHER; note = cytidine-3'-phosphate
  modified_base 6: mod_base = OTHER; note = adenosine-3'-phosphate
  modified_base 7: mod_base = OTHER; note = uridine-3'-phosphate
  modified_base 8: mod_base = OTHER; note = guanosine-3'-phosphate
  modified_base 9: mod_base = OTHER; note = adenosine-3'-phosphate
  modified_base 10: mod_base = OTHER; note = guanosine-3'-phosphate
  modified_base 11: mod_base = OTHER; note = guanosine-3'-phosphate
  modified_base 12: mod_base = OTHER; note = guanosine-3'-phosphate
  modified_base 13: mod_base = OTHER; note = cytidine-3'-phosphate
  modified_base 14: mod_base = OTHER; note = uridine-3'-phosphate
  modified_base 15: mod_base = OTHER; note = cytidine-3'-phosphate
  modified_base 16: mod_base = OTHER; note = uridine-3'-phosphate
  modified_base 17: mod_base = OTHER; note = guanosine-3'-phosphate
  modified_base 18: mod_base = OTHER; note = cytidine-3'-phosphate
  modified_base 19: mod_base = OTHER; note = uridine-3'-phosphate
  misc_feature 1..19: note = RNA
  misc_feature 20..21: note = DNA
atgccatgagggctctgcttt

SEQ ID NO: 1318 - DNA, 21 bp, synthetic construct
  source 1..21: mol_type = other DNA
  modified_base 1: mod_base = OTHER; note = guanosine-3'-phosphate
  modified_base 2: mod_base = OTHER; note = cytidine-3'-phosphate
  modified_base 3: mod_base = OTHER; note = uridine-3'-phosphate
  modified_base 4: mod_base = OTHER; note = cytidine-3'-phosphate
  modified_base 5: mod_base = OTHER; note = uridine-3'-phosphate
  modified_base 6: mod_base = OTHER; note = guanosine-3'-phosphate
  modified_base 7: mod_base = OTHER; note = cytidine-3'-phosphate
  modified_base 8: mod_base = OTHER; note = uridine-3'-phosphate
  modified_base 9: mod_base = OTHER; note = guanosine-3'-phosphate
  modified_base 10: mod_base = OTHER; note = cytidine-3'-phosphate
  modified_base 11: mod_base = OTHER; note = uridine-3'-phosphate
  modified_base 12: mod_base = OTHER; note = cytidine-3'-phosphate
  modified_base 13: mod_base = OTHER; note = cytidine-3'-phosphate
  modified_base 14: mod_base = OTHER; note = uridine-3'-phosphate
  modified_base 15: mod_base = OTHER; note = guanosine-3'-phosphate
  modified_base 16: mod_base = OTHER; note = guanosine-3'-phosphate
  modified_base 17: mod_base = OTHER; note = guanosine-3'-phosphate
  modified_base 18: mod_base = OTHER; note = guanosine-3'-phosphate
  modified_base 19: mod_base = OTHER; note = uridine-3'-phosphate
  misc_feature 1..19: note = RNA
  misc_feature 20..21: note = DNA
gctctgctgctcctggggttt

SEQ ID NO: 1319 - DNA, 21 bp, synthetic construct
  source 1..21: mol_type = other DNA
  modified_base 1: mod_base = OTHER; note = uridine-3'-phosphate
  modified_base 2: mod_base = OTHER; note = cytidine-3'-phosphate
  modified_base 3: mod_base = OTHER; note = cytidine-3'-phosphate
  modified_base 4: mod_base = OTHER; note = uridine-3'-phosphate
  modified_base 5: mod_base = OTHER; note = guanosine-3'-phosphate
  modified_base 6: mod_base = OTHER; note = guanosine-3'-phosphate
  modified_base 7: mod_base = OTHER; note = guanosine-3'-phosphate
  modified_base 8: mod_base = OTHER; note = guanosine-3'-phosphate
  modified_base 9: mod_base = OTHER; note = uridine-3'-phosphate
  modified_base 10: mod_base = OTHER; note = uridine-3'-phosphate
  modified_base 11: mod_base = OTHER; note = cytidine-3'-phosphate
  modified_base 12: mod_base = OTHER; note = cytidine-3'-phosphate
  modified_base 13: mod_base = OTHER; note = uridine-3'-phosphate
  modified_base 14: mod_base = OTHER; note = guanosine-3'-phosphate
  modified_base 15: mod_base = OTHER; note = cytidine-3'-phosphate
  modified_base 16: mod_base = OTHER; note = uridine-3'-phosphate
  modified_base 17: mod_base = OTHER; note = guanosine-3'-phosphate
  modified_base 18: mod_base = OTHER; note = guanosine-3'-phosphate
  modified_base 19: mod_base = OTHER; note = uridine-3'-phosphate
  misc_feature 1..19: note = RNA
  misc_feature 20..21: note = DNA
tcctggggttcctgctggttt

SEQ ID NO: 1320 - DNA, 21 bp, synthetic construct
  source 1..21: mol_type = other DNA
  modified_base 1: mod_base = OTHER; note = cytidine-3'-phosphate
  modified_base 2: mod_base = OTHER; note = uridine-3'-phosphate
  modified_base 3: mod_base = OTHER; note = guanosine-3'-phosphate
  modified_base 4: mod_base = OTHER; note = cytidine-3'-phosphate
  modified_base 5: mod_base = OTHER; note = uridine-3'-phosphate
  modified_base 6: mod_base = OTHER; note = guanosine-3'-phosphate
  modified_base 7: mod_base = OTHER; note = guanosine-3'-phosphate
  modified_base 8: mod_base = OTHER; note = uridine-3'-phosphate
  modified_base 9: mod_base = OTHER; note = guanosine-3'-phosphate
  modified_base 10: mod_base = OTHER; note = adenosine-3'-phosphate
  modified_base 11: mod_base = OTHER; note = guanosine-3'-phosphate
  modified_base 12: mod_base = OTHER; note = cytidine-3'-phosphate
  modified_base 13: mod_base = OTHER; note = uridine-3'-phosphate
  modified_base 14: mod_base = OTHER; note = uridine-3'-phosphate
  modified_base 15: mod_base = OTHER; note = guanosine-3'-phosphate
  modified_base 16: mod_base = OTHER; note = guanosine-3'-phosphate
  modified_base 17: mod_base = OTHER; note = adenosine-3'-phosphate
  modified_base 18: mod_base = OTHER; note = guanosine-3'-phosphate
  modified_base 19: mod_base = OTHER; note = uridine-3'-phosphate
  misc_feature 1..19: note = RNA
  misc_feature 20..21: note = DNA
ctgctggtgagcttggagttt

SEQ ID NO: 1321 - DNA, 21 bp, synthetic construct
  source 1..21: mol_type = other DNA
  modified_base 1: mod_base = OTHER; note = cytidine-3'-phosphate
  modified_base 2: mod_base = OTHER; note = uridine-3'-phosphate
  modified_base 3: mod_base = OTHER; note = uridine-3'-phosphate
  modified_base 4: mod_base = OTHER; note = guanosine-3'-phosphate
  modified_base 5: mod_base = OTHER; note = guanosine-3'-phosphate
  modified_base 6: mod_base = OTHER; note = adenosine-3'-phosphate
  modified_base 7: mod_base = OTHER; note = guanosine-3'-phosphate
  modified_base 8: mod_base = OTHER; note = uridine-3'-phosphate
  modified_base 9: mod_base = OTHER; note = cytidine-3'-phosphate
  modified_base 10: mod_base = OTHER; note = adenosine-3'-phosphate
  modified_base 11: mod_base = OTHER; note = adenosine-3'-phosphate
  modified_base 12: mod_base = OTHER; note = cytidine-3'-phosphate
  modified_base 13: mod_base = OTHER; note = adenosine-3'-phosphate
  modified_base 14: mod_base = OTHER; note = cytidine-3'-phosphate
  modified_base 15: mod_base = OTHER; note = uridine-3'-phosphate
  modified_base 16: mod_base = OTHER; note = uridine-3'-phosphate
  modified_base 17: mod_base = OTHER; note = uridine-3'-phosphate
  modified_base 18: mod_base = OTHER; note = cytidine-3'-phosphate
  modified_base 19: mod_base = OTHER; note = adenosine-3'-phosphate
  misc_feature 1..19: note = RNA
  misc_feature 20..21: note = DNA
cttggagtcaacactttcatt

SEQ ID NO: 1322 - DNA, 21 bp, synthetic construct
  source 1..21: mol_type = other DNA
  modified_base 1: mod_base = OTHER; note = adenosine-3'-phosphate
  modified_base 2: mod_base = OTHER; note = cytidine-3'-phosphate
  modified_base 3: mod_base = OTHER; note = uridine-3'-phosphate
  modified_base 4: mod_base = OTHER; note = uridine-3'-phosphate
  modified_base 5: mod_base = OTHER; note = uridine-3'-phosphate
  modified_base 6: mod_base = OTHER; note = cytidine-3'-phosphate
  modified_base 7: mod_base = OTHER; note = guanosine-3'-phosphate
  modified_base 8: mod_base = OTHER; note = adenosine-3'-phosphate
  modified_base 9: mod_base = OTHER; note = uridine-3'-phosphate
  modified_base 10: mod_base = OTHER; note = uridine-3'-phosphate
  modified_base 11: mod_base = OTHER; note = cytidine-3'-phosphate
  modified_base 12: mod_base = OTHER; note = cytidine-3'-phosphate
  modified_base 13: mod_base = OTHER; note = adenosine-3'-phosphate
  modified_base 14: mod_base = OTHER; note = cytidine-3'-phosphate
  modified_base 15: mod_base = OTHER; note = cytidine-3'-phosphate
  modified_base 16: mod_base = OTHER; note = uridine-3'-phosphate
  modified_base 17: mod_base = OTHER; note = uridine-3'-phosphate
  modified_base 18: mod_base = OTHER; note = guanosine-3'-phosphate
  modified_base 19: mod_base = OTHER; note = adenosine-3'-phosphate
  misc_feature 1..19: note = RNA
  misc_feature 20..21: note = DNA
actttcgattccaccttgatt

SEQ ID NO: 1323 - DNA, 21 bp, synthetic construct
  source 1..21: mol_type = other DNA
  modified_base 1: mod_base = OTHER; note = cytidine-3'-phosphate
  modified_base 2: mod_base = OTHER; note = cytidine-3'-phosphate
  modified_base 3: mod_base = OTHER; note = adenosine-3'-phosphate
  modified_base 4: mod_base = OTHER; note = cytidine-3'-phosphate
  modified_base 5: mod_base = OTHER; note = cytidine-3'-phosphate
  modified_base 6: mod_base = OTHER; note = uridine-3'-phosphate
  modified_base 7: mod_base = OTHER; note = uridine-3'-phosphate
  modified_base 8: mod_base = OTHER; note = guanosine-3'-phosphate
  modified_base 9: mod_base = OTHER; note = guanosine-3'-phosphate
  modified_base 10: mod_base = OTHER; note = guanosine-3'-phosphate
  modified_base 11: mod_base = OTHER; note = adenosine-3'-phosphate
  modified_base 12: mod_base = OTHER; note = adenosine-3'-phosphate
  modified_base 13: mod_base = OTHER; note = guanosine-3'-phosphate
  modified_base 14: mod_base = OTHER; note = cytidine-3'-phosphate
  modified_base 15: mod_base = OTHER; note = cytidine-3'-phosphate
  modified_base 16: mod_base = OTHER; note = cytidine-3'-phosphate
  modified_base 17: mod_base = OTHER; note = cytidine-3'-phosphate
  modified_base 18: mod_base = OTHER; note = cytidine-3'-phosphate
  modified_base 19: mod_base = OTHER; note = adenosine-3'-phosphate
  misc_feature 1..19: note = RNA
  misc_feature 20..21: note = DNA
ccaccttgggaagcccccatt

SEQ ID NO: 1324 - DNA, 21 bp, synthetic construct
  source 1..21: mol_type = other DNA
  modified_base 1: mod_base = OTHER; note = guanosine-3'-phosphate
  modified_base 2: mod_base = OTHER; note = cytidine-3'-phosphate
  modified_base 3: mod_base = OTHER; note = cytidine-3'-phosphate
  modified_base 4: mod_base = OTHER; note = cytidine-3'-phosphate
  modified_base 5: mod_base = OTHER; note = cytidine-3'-phosphate
  modified_base 6: mod_base = OTHER; note = cytidine-3'-phosphate
  modified_base 7: mod_base = OTHER; note = adenosine-3'-phosphate
  modified_base 8: mod_base = OTHER; note = adenosine-3'-phosphate
  modified_base 9: mod_base = OTHER; note = guanosine-3'-phosphate
  modified_base 10: mod_base = OTHER; note = guanosine-3'-phosphate
  modified_base 11: mod_base = OTHER; note = adenosine-3'-phosphate
  modified_base 12: mod_base = OTHER; note = guanosine-3'-phosphate
  modified_base 13: mod_base = OTHER; note = cytidine-3'-phosphate
  modified_base 14: mod_base = OTHER; note = adenosine-3'-phosphate
  modified_base 15: mod_base = OTHER; note = uridine-3'-phosphate
  modified_base 16: mod_base = OTHER; note = adenosine-3'-phosphate
  modified_base 17: mod_base = OTHER; note = adenosine-3'-phosphate
  modified_base 18: mod_base = OTHER; note = guanosine-3'-phosphate
  modified_base 19: mod_base = OTHER; note = uridine-3'-phosphate
  misc_feature 1..19: note = RNA
  misc_feature 20..21: note = DNA
gcccccaaggagcataagttt

SEQ ID NO: 1325 - DNA, 21 bp, synthetic construct
  source 1..21: mol_type = other DNA
  modified_base 1: mod_base = OTHER; note = cytidine-3'-phosphate
  modified_base 2: mod_base = OTHER; note = adenosine-3'-phosphate
  modified_base 3: mod_base = OTHER; note = uridine-3'-phosphate
  modified_base 4: mod_base = OTHER; note = adenosine-3'-phosphate
  modified_base 5: mod_base = OTHER; note = adenosine-3'-phosphate
  modified_base 6: mod_base = OTHER; note = guanosine-3'-phosphate
  modified_base 7: mod_base = OTHER; note = uridine-3'-phosphate
  modified_base 8: mod_base = OTHER; note = adenosine-3'-phosphate
  modified_base 9: mod_base = OTHER; note = cytidine-3'-phosphate
  modified_base 10: mod_base = OTHER; note = adenosine-3'-phosphate
  modified_base 11: mod_base = OTHER; note = adenosine-3'-phosphate
  modified_base 12: mod_base = OTHER; note = adenosine-3'-phosphate
  modified_base 13: mod_base = OTHER; note = guanosine-3'-phosphate
  modified_base 14: mod_base = OTHER; note = cytidine-3'-phosphate
  modified_base 15: mod_base = OTHER; note = uridine-3'-phosphate
  modified_base 16: mod_base = OTHER; note = guanosine-3'-phosphate
  modified_base 17: mod_base = OTHER; note = adenosine-3'-phosphate
  modified_base 18: mod_base = OTHER; note = adenosine-3'-phosphate
  modified_base 19: mod_base = OTHER; note = adenosine-3'-phosphate
  misc_feature 1..19: note = RNA
  misc_feature 20..21: note = DNA
cataagtacaaagctgaaatt

SEQ ID NO: 1326 - DNA, 21 bp, synthetic construct
  source 1..21: mol_type = other DNA
  modified_base 1: mod_base = OTHER; note = adenosine-3'-phosphate
  modified_base 2: mod_base = OTHER; note = adenosine-3'-phosphate
  modified_base 3: mod_base = OTHER; note = guanosine-3'-phosphate
  modified_base 4: mod_base = OTHER; note = cytidine-3'-phosphate
  modified_base 5: mod_base = OTHER; note = uridine-3'-phosphate
  modified_base 6: mod_base = OTHER; note = guanosine-3'-phosphate
  modified_base 7: mod_base = OTHER; note = adenosine-3'-phosphate
  modified_base 8: mod_base = OTHER; note = adenosine-3'-phosphate
  modified_base 9: mod_base = OTHER; note = guanosine-3'-phosphate
  modified_base 10: mod_base = OTHER; note = adenosine-3'-phosphate
  modified_base 11: mod_base = OTHER; note = guanosine-3'-phosphate
  modified_base 12: mod_base = OTHER; note = cytidine-3'-phosphate
  modified_base 13: mod_base = OTHER; note = adenosine-3'-phosphate
  modified_base 14: mod_base = OTHER; note = cytidine-3'-phosphate
  modified_base 15: mod_base = OTHER; note = adenosine-3'-phosphate
  modified_base 16: mod_base = OTHER; note = cytidine-3'-phosphate
  modified_base 17: mod_base = OTHER; note = adenosine-3'-phosphate
  modified_base 18: mod_base = OTHER; note = guanosine-3'-phosphate
  modified_base 19: mod_base = OTHER; note = uridine-3'-phosphate
  misc_feature 1..19: note = RNA
  misc_feature 20..21: note = DNA
aagctgaagagcacacagttt

SEQ ID NO: 1327 - DNA, 21 bp, synthetic construct
  source 1..21: mol_type = other DNA
  modified_base 1: mod_base = OTHER; note = adenosine-3'-phosphate
  modified_base 2: mod_base = OTHER; note = cytidine-3'-phosphate
  modified_base 3: mod_base = OTHER; note = adenosine-3'-phosphate
  modified_base 4: mod_base = OTHER; note = cytidine-3'-phosphate
  modified_base 5: mod_base = OTHER; note = adenosine-3'-phosphate
  modified_base 6: mod_base = OTHER; note = guanosine-3'-phosphate
  modified_base 7: mod_base = OTHER; note = uridine-3'-phosphate
  modified_base 8: mod_base = OTHER; note = cytidine-3'-phosphate
  modified_base 9: mod_base = OTHER; note = guanosine-3'-phosphate
  modified_base 10: mod_base = OTHER; note = uridine-3'-phosphate
  modified_base 11: mod_base = OTHER; note = uridine-3'-phosphate
  modified_base 12: mod_base = OTHER; note = cytidine-3'-phosphate
  modified_base 13: mod_base = OTHER; note = uridine-3'-phosphate
  modified_base 14: mod_base = OTHER; note = cytidine-3'-phosphate
  modified_base 15: mod_base = OTHER; note = adenosine-3'-phosphate
  modified_base 16: mod_base = OTHER; note = cytidine-3'-phosphate
  modified_base 17: mod_base = OTHER; note = uridine-3'-phosphate
  modified_base 18: mod_base = OTHER; note = guanosine-3'-phosphate
  modified_base 19: mod_base = OTHER; note = uridine-3'-phosphate
  misc_feature 1..19: note = RNA
  misc_feature 20..21: note = DNA
acacagtcgttctcactgttt

SEQ ID NO: 1328 - DNA, 21 bp, synthetic construct
  source 1..21: mol_type = other DNA
  modified_base 1: mod_base = OTHER; note = uridine-3'-phosphate
  modified_base 2: mod_base = OTHER; note = uridine-3'-phosphate
  modified_base 3: mod_base = OTHER; note = cytidine-3'-phosphate
  modified_base 4: mod_base = OTHER; note = uridine-3'-phosphate
  modified_base 5: mod_base = OTHER; note = cytidine-3'-phosphate
  modified_base 6: mod_base = OTHER; note = adenosine-3'-phosphate
  modified_base 7: mod_base = OTHER; note = cytidine-3'-phosphate
  modified_base 8: mod_base = OTHER; note = uridine-3'-phosphate
  modified_base 9: mod_base = OTHER; note = guanosine-3'-phosphate
  modified_base 10: mod_base = OTHER; note = uridine-3'-phosphate
  modified_base 11: mod_base = OTHER; note = cytidine-3'-phosphate
  modified_base 12: mod_base = OTHER; note = adenosine-3'-phosphate
  modified_base 13: mod_base = OTHER; note = cytidine-3'-phosphate
  modified_base 14: mod_base = OTHER; note = cytidine-3'-phosphate
  modified_base 15: mod_base = OTHER; note = guanosine-3'-phosphate
  modified_base 16: mod_base = OTHER; note = guanosine-3'-phosphate
  modified_base 17: mod_base = OTHER; note = guanosine-3'-phosphate
  modified_base 18: mod_base = OTHER; note = guanosine-3'-phosphate
  modified_base 19: mod_base = OTHER; note = adenosine-3'-phosphate
  misc_feature 1..19: note = RNA
  misc_feature 20..21: note = DNA
ttctcactgtcaccggggatt

SEQ ID NO: 1329 - DNA, 21 bp, synthetic construct
  source 1..21: mol_type = other DNA
  modified_base 1: mod_base = OTHER; note = adenosine-3'-phosphate
  modified_base 2: mod_base = OTHER; note = cytidine-3'-phosphate
  modified_base 3: mod_base = OTHER; note = cytidine-3'-phosphate
  modified_base 4: mod_base = OTHER; note = guanosine-3'-phosphate
  modified_base 5: mod_base = OTHER; note = guanosine-3'-phosphate
  modified_base 6: mod_base = OTHER; note = guanosine-3'-phosphate
  modified_base 7: mod_base = OTHER; note = guanosine-3'-phosphate
  modified_base 8: mod_base = OTHER; note = adenosine-3'-phosphate
  modified_base 9: mod_base = OTHER; note = guanosine-3'-phosphate
  modified_base 10: mod_base = OTHER; note = cytidine-3'-phosphate
  modified_base 11: mod_base = OTHER; note = cytidine-3'-phosphate
  modified_base 12: mod_base = OTHER; note = cytidine-3'-phosphate
  modified_base 13: mod_base = OTHER; note = uridine-3'-phosphate
  modified_base 14: mod_base = OTHER; note = guanosine-3'-phosphate
  modified_base 15: mod_base = OTHER; note = cytidine-3'-phosphate
  modified_base 16: mod_base = OTHER; note = cytidine-3'-phosphate
  modified_base 17: mod_base = OTHER; note = adenosine-3'-phosphate
  modified_base 18: mod_base = OTHER; note = cytidine-3'-phosphate
  modified_base 19: mod_base = OTHER; note = uridine-3'-phosphate
  misc_feature 1..19: note = RNA
  misc_feature 20..21: note = DNA
accggggagccctgccacttt

SEQ ID NO: 1330 - DNA, 21 bp, synthetic construct
  source 1..21: mol_type = other DNA
  modified_base 1: mod_base = OTHER; note = uridine-3'-phosphate
  modified_base 2: mod_base = OTHER; note = guanosine-3'-phosphate
  modified_base 3: mod_base = OTHER; note = cytidine-3'-phosphate
  modified_base 4: mod_base = OTHER; note = cytidine-3'-phosphate
  modified_base 5: mod_base = OTHER; note = adenosine-3'-phosphate
  modified_base 6: mod_base = OTHER; note = cytidine-3'-phosphate
  modified_base 7: mod_base = OTHER; note = uridine-3'-phosphate
  modified_base 8: mod_base = OTHER; note = uridine-3'-phosphate
  modified_base 9: mod_base = OTHER; note = cytidine-3'-phosphate
  modified_base 10: mod_base = OTHER; note = cytidine-3'-phosphate
  modified_base 11: mod_base = OTHER; note = cytidine-3'-phosphate
  modified_base 12: mod_base = OTHER; note = cytidine-3'-phosphate
  modified_base 13: mod_base = OTHER; note = uridine-3'-phosphate
  modified_base 14: mod_base = OTHER; note = uridine-3'-phosphate
  modified_base 15: mod_base = OTHER; note = cytidine-3'-phosphate
  modified_base 16: mod_base = OTHER; note = cytidine-3'-phosphate
  modified_base 17: mod_base = OTHER; note = adenosine-3'-phosphate
  modified_base 18: mod_base = OTHER; note = guanosine-3'-phosphate
  modified_base 19: mod_base = OTHER; note = uridine-3'-phosphate
  misc_feature 1..19: note = RNA
  misc_feature 20..21: note = DNA
tgccacttccccttccagttt

SEQ ID NO: 1331 - DNA, 21 bp, synthetic construct
  source 1..21: mol_type = other DNA
  modified_base 1: mod_base = OTHER; note = uridine-3'-phosphate
  modified_base 2: mod_base = OTHER; note = uridine-3'-phosphate
  modified_base 3: mod_base = OTHER; note = cytidine-3'-phosphate
  modified_base 4: mod_base = OTHER; note = cytidine-3'-phosphate
  modified_base 5: mod_base = OTHER; note = adenosine-3'-phosphate
  modified_base 6: mod_base = OTHER; note = guanosine-3'-phosphate
  modified_base 7: mod_base = OTHER; note = uridine-3'-phosphate
  modified_base 8: mod_base = OTHER; note = adenosine-3'-phosphate
  modified_base 9: mod_base = OTHER; note = cytidine-3'-phosphate
  modified_base 10: mod_base = OTHER; note = cytidine-3'-phosphate
  modified_base 11: mod_base = OTHER; note = adenosine-3'-phosphate
  modified_base 12: mod_base = OTHER; note = cytidine-3'-phosphate
  modified_base 13: mod_base = OTHER; note = cytidine-3'-phosphate
  modified_base 14: mod_base = OTHER; note = guanosine-3'-phosphate
  modified_base 15: mod_base = OTHER; note = guanosine-3'-phosphate
  modified_base 16: mod_base = OTHER; note = cytidine-3'-phosphate
  modified_base 17: mod_base = OTHER; note = adenosine-3'-phosphate
  modified_base 18: mod_base = OTHER; note = guanosine-3'-phosphate
  modified_base 19: mod_base = OTHER; note = adenosine-3'-phosphate
  misc_feature 1..19: note = RNA
  misc_feature 20..21: note = DNA
ttccagtaccaccggcagatt

SEQ ID NO: 1332 - DNA, 21 bp, synthetic construct
  source 1..21: mol_type = other DNA
  modified_base 1: mod_base = OTHER; note = adenosine-3'-phosphate
  modified_base 2: mod_base = OTHER; note = cytidine-3'-phosphate
  modified_base 3: mod_base = OTHER; note = cytidine-3'-phosphate
  modified_base 4: mod_base = OTHER; note = guanosine-3'-phosphate
  modified_base 5: mod_base = OTHER; note = guanosine-3'-phosphate
  modified_base 6: mod_base = OTHER; note = cytidine-3'-phosphate
  modified_base 7: mod_base = OTHER; note = adenosine-3'-phosphate
  modified_base 8: mod_base = OTHER; note = guanosine-3'-phosphate
  modified_base 9: mod_base = OTHER; note = cytidine-3'-phosphate
  modified_base 10: mod_base = OTHER; note = uridine-3'-phosphate
  modified_base 11: mod_base = OTHER; note = guanosine-3'-phosphate
  modified_base 12: mod_base = OTHER; note = uridine-3'-phosphate
  modified_base 13: mod_base = OTHER; note = adenosine-3'-phosphate
  modified_base 14: mod_base = OTHER; note = cytidine-3'-phosphate
  modified_base 15: mod_base = OTHER; note = cytidine-3'-phosphate
  modified_base 16: mod_base = OTHER; note = adenosine-3'-phosphate
  modified_base 17: mod_base = OTHER; note = cytidine-3'-phosphate
  modified_base 18: mod_base = OTHER; note = adenosine-3'-phosphate
  modified_base 19: mod_base = OTHER; note = adenosine-3'-phosphate
  misc_feature 1..19: note = RNA
  misc_feature 20..21: note = DNA
accggcagctgtaccacaatt

SEQ ID NO: 1333 - DNA, 21 bp, synthetic construct
  source 1..21: mol_type = other DNA
  modified_base 1: mod_base = OTHER; note = uridine-3'-phosphate
  modified_base 2: mod_base = OTHER; note = adenosine-3'-phosphate
  modified_base 3: mod_base = OTHER; note = cytidine-3'-phosphate
  modified_base 4: mod_base = OTHER; note = cytidine-3'-phosphate
  modified_base 5: mod_base = OTHER; note = adenosine-3'-phosphate
  modified_base 6: mod_base = OTHER; note = cytidine-3'-phosphate
  modified_base 7: mod_base = OTHER; note = adenosine-3'-phosphate
  modified_base 8: mod_base = OTHER; note = adenosine-3'-phosphate
  modified_base 9: mod_base = OTHER; note = adenosine-3'-phosphate
  modified_base 10: mod_base = OTHER; note = uridine-3'-phosphate
  modified_base 11: mod_base = OTHER; note = guanosine-3'-phosphate
  modified_base 12: mod_base = OTHER; note = uridine-3'-phosphate
  modified_base 13: mod_base = OTHER; note = adenosine-3'-phosphate
  modified_base 14: mod_base = OTHER; note = cytidine-3'-phosphate
  modified_base 15: mod_base = OTHER; note = cytidine-3'-phosphate
  modified_base 16: mod_base = OTHER; note = cytidine-3'-phosphate
  modified_base 17: mod_base = OTHER; note = adenosine-3'-phosphate
  modified_base 18: mod_base = OTHER; note = cytidine-3'-phosphate
  modified_base 19: mod_base = OTHER; note = adenosine-3'-phosphate
  misc_feature 1..19: note = RNA
  misc_feature 20..21: note = DNA
taccacaaatgtacccacatt

SEQ ID NO: 1334 - DNA, 21 bp, synthetic construct
  source 1..21: mol_type = other DNA
  modified_base 1: mod_base = OTHER; note = uridine-3'-phosphate
  modified_base 2: mod_base = OTHER; note = adenosine-3'-phosphate
  modified_base 3: mod_base = OTHER; note = cytidine-3'-phosphate
  modified_base 4: mod_base = OTHER; note = cytidine-3'-phosphate
  modified_base 5: mod_base = OTHER; note = cytidine-3'-phosphate
  modified_base 6: mod_base = OTHER; note = adenosine-3'-phosphate
  modified_base 7: mod_base = OTHER; note = cytidine-3'-phosphate
  modified_base 8: mod_base = OTHER; note = adenosine-3'-phosphate
  modified_base 9: mod_base = OTHER; note = adenosine-3'-phosphate
  modified_base 10: mod_base = OTHER; note = guanosine-3'-phosphate
  modified_base 11: mod_base = OTHER; note = guanosine-3'-phosphate
  modified_base 12: mod_base = OTHER; note = guanosine-3'-phosphate
  modified_base 13: mod_base = OTHER; note = cytidine-3'-phosphate
  modified_base 14: mod_base = OTHER; note = cytidine-3'-phosphate
  modified_base 15: mod_base = OTHER; note = guanosine-3'-phosphate
  modified_base 16: mod_base = OTHER; note = guanosine-3'-phosphate
  modified_base 17: mod_base = OTHER; note = cytidine-3'-phosphate
  modified_base 18: mod_base = OTHER; note = cytidine-3'-phosphate
  modified_base 19: mod_base = OTHER; note = adenosine-3'-phosphate
  misc_feature 1..19: note = RNA
  misc_feature 20..21: note = DNA
tacccacaagggccggccatt

SEQ ID NO: 1335 - DNA, 21 bp, synthetic construct
  source 1..21: mol_type = other DNA
  modified_base 1: mod_base = OTHER; note = guanosine-3'-phosphate
  modified_base 2: mod_base = OTHER; note = cytidine-3'-phosphate
  modified_base 3: mod_base = OTHER; note = cytidine-3'-phosphate
  modified_base 4: mod_base = OTHER; note = guanosine-3'-phosphate
  modified_base 5: mod_base = OTHER; note = guanosine-3'-phosphate
  modified_base 6: mod_base = OTHER; note = cytidine-3'-phosphate
  modified_base 7: mod_base = OTHER; note = cytidine-3'-phosphate
  modified_base 8: mod_base = OTHER; note = adenosine-3'-phosphate
  modified_base 9: mod_base = OTHER; note = guanosine-3'-phosphate
  modified_base 10: mod_base = OTHER; note = guanosine-3'-phosphate
  modified_base 11: mod_base = OTHER; note = cytidine-3'-phosphate
  modified_base 12: mod_base = OTHER; note = cytidine-3'-phosphate
  modified_base 13: mod_base = OTHER; note = cytidine-3'-phosphate
  modified_base 14: mod_base = OTHER; note = uridine-3'-phosphate
  modified_base 15: mod_base = OTHER; note = cytidine-3'-phosphate
  modified_base 16: mod_base = OTHER; note = adenosine-3'-phosphate
  modified_base 17: mod_base = OTHER; note = guanosine-3'-phosphate
  modified_base 18: mod_base = OTHER; note = cytidine-3'-phosphate
  modified_base 19: mod_base = OTHER; note = adenosine-3'-phosphate
  misc_feature 1..19: note = RNA
  misc_feature 20..21: note = DNA
gccggccaggccctcagcatt

SEQ ID NO: 1336 - DNA, 21 bp, synthetic construct
  source 1..21: mol_type = other DNA
  modified_base 1: mod_base = OTHER; note = cytidine-3'-phosphate
  modified_base 2: mod_base = OTHER; note = uridine-3'-phosphate
  modified_base 3: mod_base = OTHER; note = cytidine-3'-phosphate
  modified_base 4: mod_base = OTHER; note = adenosine-3'-phosphate
  modified_base 5: mod_base = OTHER; note = guanosine-3'-phosphate
  modified_base 6: mod_base = OTHER; note = cytidine-3'-phosphate
  modified_base 7: mod_base = OTHER; note = cytidine-3'-phosphate
  modified_base 8: mod_base = OTHER; note = cytidine-3'-phosphate
  modified_base 9: mod_base = OTHER; note = uridine-3'-phosphate
  modified_base 10: mod_base = OTHER; note = guanosine-3'-phosphate
  modified_base 11: mod_base = OTHER; note = guanosine-3'-phosphate
  modified_base 12: mod_base = OTHER; note = uridine-3'-phosphate
  modified_base 13: mod_base = OTHER; note = guanosine-3'-phosphate
  modified_base 14: mod_base = OTHER; note = uridine-3'-phosphate
  modified_base 15: mod_base = OTHER; note = guanosine-3'-phosphate
  modified_base 16: mod_base = OTHER; note = cytidine-3'-phosphate
  modified_base 17: mod_base = OTHER; note = uridine-3'-phosphate
  modified_base 18: mod_base = OTHER; note = adenosine-3'-phosphate
  modified_base 19: mod_base = OTHER; note = adenosine-3'-phosphate
  misc_feature 1..19: note = RNA
  misc_feature 20..21: note = DNA
ctcagccctggtgtgctaatt

SEQ ID NO: 1337 - DNA, 21 bp, synthetic construct
  source 1..21: mol_type = other DNA
  modified_base 1: mod_base = OTHER; note = uridine-3'-phosphate
  modified_base 2: mod_base = OTHER; note = guanosine-3'-phosphate
  modified_base 3: mod_base = OTHER; note = uridine-3'-phosphate
  modified_base 4: mod_base = OTHER; note = guanosine-3'-phosphate
  modified_base 5: mod_base = OTHER; note = cytidine-3'-phosphate
  modified_base 6: mod_base = OTHER; note = uridine-3'-phosphate
  modified_base 7: mod_base = OTHER; note = adenosine-3'-phosphate
  modified_base 8: mod_base = OTHER; note = cytidine-3'-phosphate
  modified_base 9: mod_base = OTHER; note = cytidine-3'-phosphate
  modified_base 10: mod_base = OTHER; note = adenosine-3'-phosphate
  modified_base 11: mod_base = OTHER; note = cytidine-3'-phosphate
  modified_base 12: mod_base = OTHER; note = cytidine-3'-phosphate
  modified_base 13: mod_base = OTHER; note = cytidine-3'-phosphate
  modified_base 14: mod_base = OTHER; note = cytidine-3'-phosphate
  modified_base 15: mod_base = OTHER; note = cytidine-3'-phosphate
  modified_base 16: mod_base = OTHER; note = adenosine-3'-phosphate
  modified_base 17: mod_base = OTHER; note = adenosine-3'-phosphate
  modified_base 18: mod_base = OTHER; note = cytidine-3'-phosphate
  modified_base 19: mod_base = OTHER; note = uridine-3'-phosphate
  misc_feature 1..19: note = RNA
  misc_feature 20..21: note = DNA
tgtgctaccacccccaacttt

SEQ ID NO: 1338 - DNA, 21 bp, synthetic construct
  source 1..21: mol_type = other DNA
  modified_base 1: mod_base = OTHER; note = adenosine-3'-phosphate
  modified_base 2: mod_base = OTHER; note = cytidine-3'-phosphate
  modified_base 3: mod_base = OTHER; note = cytidine-3'-phosphate
  modified_base 4: mod_base = OTHER; note = cytidine-3'-phosphate
  modified_base 5: mod_base = OTHER; note = cytidine-3'-phosphate
  modified_base 6: mod_base = OTHER; note = cytidine-3'-phosphate
  modified_base 7: mod_base = OTHER; note = adenosine-3'-phosphate
  modified_base 8: mod_base = OTHER; note = adenosine-3'-phosphate
  modified_base 9: mod_base = OTHER; note = cytidine-3'-phosphate
  modified_base 10: mod_base = OTHER; note = uridine-3'-phosphate
  modified_base 11: mod_base = OTHER; note = uridine-3'-phosphate
  modified_base 12: mod_base = OTHER; note = uridine-3'-phosphate
  modified_base 13: mod_base = OTHER; note = guanosine-3'-phosphate
  modified_base 14: mod_base = OTHER; note = adenosine-3'-phosphate
  modified_base 15: mod_base = OTHER; note = uridine-3'-phosphate
  modified_base 16: mod_base = OTHER; note = cytidine-3'-phosphate
  modified_base 17: mod_base = OTHER; note = adenosine-3'-phosphate
  modified_base 18: mod_base = OTHER; note = guanosine-3'-phosphate
  modified_base 19: mod_base = OTHER; note = adenosine-3'-phosphate
  misc_feature 1..19: note = RNA
  misc_feature 20..21: note = DNA
acccccaactttgatcagatt

SEQ ID NO: 1339 - DNA, 21 bp, synthetic construct
  source 1..21: mol_type = other DNA
  modified_base 1: mod_base = OTHER; note = adenosine-3'-phosphate
  modified_base 2: mod_base = OTHER; note = uridine-3'-phosphate
  modified_base 3: mod_base = OTHER; note = cytidine-3'-phosphate
  modified_base 4: mod_base = OTHER; note = adenosine-3'-phosphate
  modified_base 5: mod_base = OTHER; note = guanosine-3'-phosphate
  modified_base 6: mod_base = OTHER; note = guanosine-3'-phosphate
  modified_base 7: mod_base = OTHER; note = adenosine-3'-phosphate
  modified_base 8: mod_base = OTHER; note = cytidine-3'-phosphate
  modified_base 9: mod_base = OTHER; note = cytidine-3'-phosphate
  modified_base 10: mod_base = OTHER; note = adenosine-3'-phosphate
  modified_base 11: mod_base = OTHER; note = guanosine-3'-phosphate
  modified_base 12: mod_base = OTHER; note = cytidine-3'-phosphate
  modified_base 13: mod_base = OTHER; note = guanosine-3'-phosphate
  modified_base 14: mod_base = OTHER; note = adenosine-3'-phosphate
  modified_base 15: mod_base = OTHER; note = uridine-3'-phosphate
  modified_base 16: mod_base = OTHER; note = guanosine-3'-phosphate
  modified_base 17: mod_base = OTHER; note = guanosine-3'-phosphate
  modified_base 18: mod_base = OTHER; note = guanosine-3'-phosphate
  modified_base 19: mod_base = OTHER; note = adenosine-3'-phosphate
  misc_feature 1..19: note = RNA
  misc_feature 20..21: note = DNA
atcaggaccagcgatgggatt

SEQ ID NO: 1340 - DNA, 21 bp, synthetic construct
  source 1..21: mol_type = other DNA
  modified_base 1: mod_base = OTHER; note = adenosine-3'-phosphate
  modified_base 2: mod_base = OTHER; note = guanosine-3'-phosphate
  modified_base 3: mod_base = OTHER; note = cytidine-3'-phosphate
  modified_base 4: mod_base = OTHER; note = guanosine-3'-phosphate
  modified_base 5: mod_base = OTHER; note = adenosine-3'-phosphate
  modified_base 6: mod_base = OTHER; note = uridine-3'-phosphate
  modified_base 7: mod_base = OTHER; note = guanosine-3'-phosphate
  modified_base 8: mod_base = OTHER; note = guanosine-3'-phosphate
  modified_base 9: mod_base = OTHER; note = guanosine-3'-phosphate
  modified_base 10: mod_base = OTHER; note = guanosine-3'-phosphate
  modified_base 11: mod_base = OTHER; note = adenosine-3'-phosphate
  modified_base 12: mod_base = OTHER; note = uridine-3'-phosphate
  modified_base 13: mod_base = OTHER; note = adenosine-3'-phosphate
  modified_base 14: mod_base = OTHER; note = cytidine-3'-phosphate
  modified_base 15: mod_base = OTHER; note = uridine-3'-phosphate
  modified_base 16: mod_base = OTHER; note = guanosine-3'-phosphate
  modified_base 17: mod_base = OTHER; note = uridine-3'-phosphate
  modified_base 18: mod_base = OTHER; note = uridine-3'-phosphate
  modified_base 19: mod_base = OTHER; note = uridine-3'-phosphate
  misc_feature 1..19: note = RNA
  misc_feature 20..21: note = DNA
agcgatggggatactgttttt

SEQ ID NO: 1341 - DNA, 21 bp, synthetic construct
  source 1..21: mol_type = other DNA
  modified_base 1: mod_base = OTHER; note = uridine-3'-phosphate
  modified_base 2: mod_base = OTHER; note = adenosine-3'-phosphate
  modified_base 3: mod_base = OTHER; note = cytidine-3'-phosphate
  modified_base 4: mod_base = OTHER; note = uridine-3'-phosphate
  modified_base 5: mod_base = OTHER; note = guanosine-3'-phosphate
  modified_base 6: mod_base = OTHER; note = uridine-3'-phosphate
  modified_base 7: mod_base = OTHER; note = uridine-3'-phosphate
  modified_base 8: mod_base = OTHER; note = uridine-3'-phosphate
  modified_base 9: mod_base = OTHER; note = guanosine-3'-phosphate
  modified_base 10: mod_base = OTHER; note = guanosine-3'-phosphate
  modified_base 11: mod_base = OTHER; note = adenosine-3'-phosphate
  modified_base 12: mod_base = OTHER; note = guanosine-3'-phosphate
  modified_base 13: mod_base = OTHER; note = cytidine-3'-phosphate
  modified_base 14: mod_base = OTHER; note = cytidine-3'-phosphate
  modified_base 15: mod_base = OTHER; note = cytidine-3'-phosphate
  modified_base 16: mod_base = OTHER; note = adenosine-3'-phosphate
  modified_base 17: mod_base = OTHER; note = adenosine-3'-phosphate
  modified_base 18: mod_base = OTHER; note = guanosine-3'-phosphate
  modified_base 19: mod_base = OTHER; note = adenosine-3'-phosphate
  misc_feature 1..19: note = RNA
  misc_feature 20..21: note = DNA
tactgtttggagcccaagatt

SEQ ID NO: 1342 - DNA, 21 bp, synthetic construct
  source 1..21: mol_type = other DNA
  modified_base 1: mod_base = OTHER; note = cytidine-3'-phosphate
  modified_base 2: mod_base = OTHER; note = cytidine-3'-phosphate
  modified_base 3: mod_base = OTHER; note = adenosine-3'-phosphate
  modified_base 4: mod_base = OTHER; note = adenosine-3'-phosphate
  modified_base 5: mod_base = OTHER; note = guanosine-3'-phosphate
  modified_base 6: mod_base = OTHER; note = adenosine-3'-phosphate
  modified_base 7: mod_base = OTHER; note = adenosine-3'-phosphate
  modified_base 8: mod_base = OTHER; note = adenosine-3'-phosphate
  modified_base 9: mod_base = OTHER; note = guanosine-3'-phosphate
  modified_base 10: mod_base = OTHER; note = uridine-3'-phosphate
  modified_base 11: mod_base = OTHER; note = guanosine-3'-phosphate
  modified_base 12: mod_base = OTHER; note = adenosine-3'-phosphate
  modified_base 13: mod_base = OTHER; note = adenosine-3'-phosphate
  modified_base 14: mod_base = OTHER; note = adenosine-3'-phosphate
  modified_base 15: mod_base = OTHER; note = guanosine-3'-phosphate
  modified_base 16: mod_base = OTHER; note = adenosine-3'-phosphate
  modified_base 17: mod_base = OTHER; note = cytidine-3'-phosphate
  modified_base 18: mod_base = OTHER; note = cytidine-3'-phosphate
  modified_base 19: mod_base = OTHER; note = adenosine-3'-phosphate
  misc_feature 1..19: note = RNA
  misc_feature 20..21: note = DNA
ccaagaaagtgaaagaccatt

SEQ ID NO: 1343 - DNA, 21 bp, synthetic construct
  source 1..21: mol_type = other DNA
  modified_base 1: mod_base = OTHER; note = adenosine-3'-phosphate
  modified_base 2: mod_base = OTHER; note = adenosine-3'-phosphate
  modified_base 3: mod_base = OTHER; note = adenosine-3'-phosphate
  modified_base 4: mod_base = OTHER; note = guanosine-3'-phosphate
  modified_base 5: mod_base = OTHER; note = adenosine-3'-phosphate
  modified_base 6: mod_base = OTHER; note = cytidine-3'-phosphate
  modified_base 7: mod_base = OTHER; note = cytidine-3'-phosphate
  modified_base 8: mod_base = OTHER; note = adenosine-3'-phosphate
  modified_base 9: mod_base = OTHER; note = cytidine-3'-phosphate
  modified_base 10: mod_base = OTHER; note = uridine-3'-phosphate
  modified_base 11: mod_base = OTHER; note = guanosine-3'-phosphate
  modified_base 12: mod_base = OTHER; note = cytidine-3'-phosphate
  modified_base 13: mod_base = OTHER; note = adenosine-3'-phosphate
  modified_base 14: mod_base = OTHER; note = guanosine-3'-phosphate
  modified_base 15: mod_base = OTHER; note = cytidine-3'-phosphate
  modified_base 16: mod_base = OTHER; note = adenosine-3'-phosphate
  modified_base 17: mod_base = OTHER; note = adenosine-3'-phosphate
  modified_base 18: mod_base = OTHER; note = adenosine-3'-phosphate
  modified_base 19: mod_base = OTHER; note = cytidine-3'-phosphate
  misc_feature 1..19: note = RNA
  misc_feature 20..21: note = DNA
aaagaccactgcagcaaactt

SEQ ID NO: 1344 - DNA, 21 bp, synthetic construct
  source 1..21: mol_type = other DNA
  modified_base 1: mod_base = OTHER; note = uridine-3'-phosphate
  modified_base 2: mod_base = OTHER; note = guanosine-3'-phosphate
  modified_base 3: mod_base = OTHER; note = cytidine-3'-phosphate
  modified_base 4: mod_base = OTHER; note = adenosine-3'-phosphate
  modified_base 5: mod_base = OTHER; note = guanosine-3'-phosphate
  modified_base 6: mod_base = OTHER; note = cytidine-3'-phosphate
  modified_base 7: mod_base = OTHER; note = adenosine-3'-phosphate
  modified_base 8: mod_base = OTHER; note = adenosine-3'-phosphate
  modified_base 9: mod_base = OTHER; note = adenosine-3'-phosphate
  modified_base 10: mod_base = OTHER; note = cytidine-3'-phosphate
  modified_base 11: mod_base = OTHER; note = adenosine-3'-phosphate
  modified_base 12: mod_base = OTHER; note = cytidine-3'-phosphate
  modified_base 13: mod_base = OTHER; note = adenosine-3'-phosphate
  modified_base 14: mod_base = OTHER; note = guanosine-3'-phosphate
  modified_base 15: mod_base = OTHER; note = cytidine-3'-phosphate
  modified_base 16: mod_base = OTHER; note = cytidine-3'-phosphate
  modified_base 17: mod_base = OTHER; note = cytidine-3'-phosphate
  modified_base 18: mod_base = OTHER; note = cytidine-3'-phosphate
  modified_base 19: mod_base = OTHER; note = uridine-3'-phosphate
  misc_feature 1..19: note = RNA
  misc_feature 20..21: note = DNA
tgcagcaaacacagccccttt

SEQ ID NO: 1345 - DNA, 21 bp, synthetic construct
  source 1..21: mol_type = other DNA
  modified_base 1: mod_base = OTHER; note = adenosine-3'-phosphate
  modified_base 2: mod_base = OTHER; note = guanosine-3'-phosphate
  modified_base 3: mod_base = OTHER; note = cytidine-3'-phosphate
  modified_base 4: mod_base = OTHER; note = cytidine-3'-phosphate
  modified_base 5: mod_base = OTHER; note = cytidine-3'-phosphate
  modified_base 6: mod_base = OTHER; note = cytidine-3'-phosphate
  modified_base 7: mod_base = OTHER; note = uridine-3'-phosphate
  modified_base 8: mod_base = OTHER; note = guanosine-3'-phosphate
  modified_base 9: mod_base = OTHER; note = cytidine-3'-phosphate
  modified_base 10: mod_base = OTHER; note = cytidine-3'-phosphate
  modified_base 11: mod_base = OTHER; note = adenosine-3'-phosphate
  modified_base 12: mod_base = OTHER; note = guanosine-3'-phosphate
  modified_base 13: mod_base = OTHER; note = adenosine-3'-phosphate
  modified_base 14: mod_base = OTHER; note = adenosine-3'-phosphate
  modified_base 15: mod_base = OTHER; note = adenosine-3'-phosphate
  modified_base 16: mod_base = OTHER; note = guanosine-3'-phosphate
  modified_base 17: mod_base = OTHER; note = guanosine-3'-phosphate
  modified_base 18: mod_base = OTHER; note = adenosine-3'-phosphate
  modified_base 19: mod_base = OTHER; note = adenosine-3'-phosphate
  misc_feature 1..19: note = RNA
  misc_feature 20..21: note = DNA
agcccctgccagaaaggaatt

SEQ ID NO: 1346 - DNA, 21 bp, synthetic construct
  source 1..21: mol_type = other DNA
  modified_base 1: mod_base = OTHER; note = adenosine-3'-phosphate
  modified_base 2: mod_base = OTHER; note = guanosine-3'-phosphate
  modified_base 3: mod_base = OTHER; note = adenosine-3'-phosphate
  modified_base 4: mod_base = OTHER; note = adenosine-3'-phosphate
  modified_base 5: mod_base = OTHER; note = adenosine-3'-phosphate
  modified_base 6: mod_base = OTHER; note = guanosine-3'-phosphate
  modified_base 7: mod_base = OTHER; note = guanosine-3'-phosphate
  modified_base 8: mod_base = OTHER; note = adenosine-3'-phosphate
  modified_base 9: mod_base = OTHER; note = guanosine-3'-phosphate
  modified_base 10: mod_base = OTHER; note = guanosine-3'-phosphate
  modified_base 11: mod_base = OTHER; note = guanosine-3'-phosphate
  modified_base 12: mod_base = OTHER; note = adenosine-3'-phosphate
  modified_base 13: mod_base = OTHER; note = cytidine-3'-phosphate
  modified_base 14: mod_base = OTHER; note = cytidine-3'-phosphate
  modified_base 15: mod_base = OTHER; note = uridine-3'-phosphate
  modified_base 16: mod_base = OTHER; note = guanosine-3'-phosphate
  modified_base 17: mod_base = OTHER; note = uridine-3'-phosphate
  modified_base 18: mod_base = OTHER; note = guanosine-3'-phosphate
  modified_base 19: mod_base = OTHER; note = uridine-3'-phosphate
  misc_feature 1..19: note = RNA
  misc_feature 20..21: note = DNA
agaaaggagggacctgtgttt

SEQ ID NO: 1347 - DNA, 21 bp, synthetic construct
  source 1..21: mol_type = other DNA
  modified_base 1: mod_base = OTHER; note = adenosine-3'-phosphate
  modified_base 2: mod_base = OTHER; note = cytidine-3'-phosphate
  modified_base 3: mod_base = OTHER; note = cytidine-3'-phosphate
  modified_base 4: mod_base = OTHER; note = uridine-3'-phosphate
  modified_base 5: mod_base = OTHER; note = guanosine-3'-phosphate
  modified_base 6: mod_base = OTHER; note = uridine-3'-phosphate
  modified_base 7: mod_base = OTHER; note = guanosine-3'-phosphate
  modified_base 8: mod_base = OTHER; note = uridine-3'-phosphate
  modified_base 9: mod_base = OTHER; note = guanosine-3'-phosphate
  modified_base 10: mod_base = OTHER; note = adenosine-3'-phosphate
  modified_base 11: mod_base = OTHER; note = adenosine-3'-phosphate
  modified_base 12: mod_base = OTHER; note = cytidine-3'-phosphate
  modified_base 13: mod_base = OTHER; note = adenosine-3'-phosphate
  modified_base 14: mod_base = OTHER; note = uridine-3'-phosphate
  modified_base 15: mod_base = OTHER; note = guanosine-3'-phosphate
  modified_base 16: mod_base = OTHER; note = cytidine-3'-phosphate
  modified_base 17: mod_base = OTHER; note = cytidine-3'-phosphate
  modified_base 18: mod_base = OTHER; note = adenosine-3'-phosphate
  modified_base 19: mod_base = OTHER; note = adenosine-3'-phosphate
  misc_feature 1..19: note = RNA
  misc_feature 20..21: note = DNA
acctgtgtgaacatgccaatt

SEQ ID NO: 1348 - DNA, 21 bp, synthetic construct
  source 1..21: mol_type = other DNA
  modified_base 1: mod_base = OTHER; note = adenosine-3'-phosphate
  modified_base 2: mod_base = OTHER; note = uridine-3'-phosphate
  modified_base 3: mod_base = OTHER; note = guanosine-3'-phosphate
  modified_base 4: mod_base = OTHER; note = cytidine-3'-phosphate
  modified_base 5: mod_base = OTHER; note = cytidine-3'-phosphate
  modified_base 6: mod_base = OTHER; note = adenosine-3'-phosphate
  modified_base 7: mod_base = OTHER; note = adenosine-3'-phosphate
  modified_base 8: mod_base = OTHER; note = guanosine-3'-phosphate
  modified_base 9: mod_base = OTHER; note = cytidine-3'-phosphate
  modified_base 10: mod_base = OTHER; note = guanosine-3'-phosphate
  modified_base 11: mod_base = OTHER; note = guanosine-3'-phosphate
  modified_base 12: mod_base = OTHER; note = cytidine-3'-phosphate
  modified_base 13: mod_base = OTHER; note = cytidine-3'-phosphate
  modified_base 14: mod_base = OTHER; note = cytidine-3'-phosphate
  modified_base 15: mod_base = OTHER; note = cytidine-3'-phosphate
  modified_base 16: mod_base = OTHER; note = cytidine-3'-phosphate
  modified_base 17: mod_base = OTHER; note = adenosine-3'-phosphate
  modified_base 18: mod_base = OTHER; note = cytidine-3'-phosphate
  modified_base 19: mod_base = OTHER; note = uridine-3'-phosphate
  misc_feature 1..19: note = RNA
  misc_feature 20..21: note = DNA
atgccaagcggcccccacttt

SEQ ID NO: 1349 - DNA, 21 bp, synthetic construct
  source 1..21: mol_type = other DNA
  modified_base 1: mod_base = OTHER; note = guanosine-3'-phosphate
  modified_base 2: mod_base = OTHER; note = cytidine-3'-phosphate
  modified_base 3: mod_base = OTHER; note = cytidine-3'-phosphate
  modified_base 4: mod_base = OTHER; note = cytidine-3'-phosphate
  modified_base 5: mod_base = OTHER; note = cytidine-3'-phosphate
  modified_base 6: mod_base = OTHER; note = cytidine-3'-phosphate
  modified_base 7: mod_base = OTHER; note = adenosine-3'-phosphate
  modified_base 8: mod_base = OTHER; note = cytidine-3'-phosphate
  modified_base 9: mod_base = OTHER; note = uridine-3'-phosphate
  modified_base 10: mod_base = OTHER; note = guanosine-3'-phosphate
  modified_base 11: mod_base = OTHER; note = uridine-3'-phosphate
  modified_base 12: mod_base = OTHER; note = cytidine-3'-phosphate
  modified_base 13: mod_base = OTHER; note = uridine-3'-phosphate
  modified_base 14: mod_base = OTHER; note = cytidine-3'-phosphate
  modified_base 15: mod_base = OTHER; note = uridine-3'-phosphate
  modified_base 16: mod_base = OTHER; note = guanosine-3'-phosphate
  modified_base 17: mod_base = OTHER; note = uridine-3'-phosphate
  modified_base 18: mod_base = OTHER; note = cytidine-3'-phosphate
  modified_base 19: mod_base = OTHER; note = adenosine-3'-phosphate
  misc_feature 1..19: note = RNA
  misc_feature 20..21: note = DNA
gcccccactgtctctgtcatt

SEQ ID NO: 1350 - DNA, 21 bp, synthetic construct
  source 1..21: mol_type = other DNA
  modified_base 1: mod_base = OTHER; note = cytidine-3'-phosphate
  modified_base 2: mod_base = OTHER; note = adenosine-3'-phosphate
  modified_base 3: mod_base = OTHER; note = cytidine-3'-phosphate
  modified_base 4: mod_base = OTHER; note = cytidine-3'-phosphate
  modified_base 5: mod_base = OTHER; note = uridine-3'-phosphate
  modified_base 6: mod_base = OTHER; note = cytidine-3'-phosphate
  modified_base 7: mod_base = OTHER; note = adenosine-3'-phosphate
  modified_base 8: mod_base = OTHER; note = cytidine-3'-phosphate
  modified_base 9: mod_base = OTHER; note = uridine-3'-phosphate
  modified_base 10: mod_base = OTHER; note = guanosine-3'-phosphate
  modified_base 11: mod_base = OTHER; note = guanosine-3'-phosphate
  modified_base 12: mod_base = OTHER; note = adenosine-3'-phosphate
  modified_base 13: mod_base = OTHER; note = adenosine-3'-phosphate
  modified_base 14: mod_base = OTHER; note = adenosine-3'-phosphate
  modified_base 15: mod_base = OTHER; note = cytidine-3'-phosphate
  modified_base 16: mod_base = OTHER; note = cytidine-3'-phosphate
  modified_base 17: mod_base = OTHER; note = adenosine-3'-phosphate
  modified_base 18: mod_base = OTHER; note = cytidine-3'-phosphate
  modified_base 19: mod_base = OTHER; note = uridine-3'-phosphate
  misc_feature 1..19: note = RNA
  misc_feature 20..21: note = DNA
cacctcactggaaaccacttt

SEQ ID NO: 1351 - DNA, 21 bp, synthetic construct
  source 1..21: mol_type = other DNA
  modified_base 1: mod_base = OTHER; note = adenosine-3'-phosphate
  modified_base 2: mod_base = OTHER; note = adenosine-3'-phosphate
  modified_base 3: mod_base = OTHER; note = cytidine-3'-phosphate
  modified_base 4: mod_base = OTHER; note = cytidine-3'-phosphate
  modified_base 5: mod_base = OTHER; note = adenosine-3'-phosphate
  modified_base 6: mod_base = OTHER; note = cytidine-3'-phosphate
  modified_base 7: mod_base = OTHER; note = uridine-3'-phosphate
  modified_base 8: mod_base = OTHER; note = guanosine-3'-phosphate
  modified_base 9: mod_base = OTHER; note = cytidine-3'-phosphate
  modified_base 10: mod_base = OTHER; note = cytidine-3'-phosphate
  modified_base 11: mod_base = OTHER; note = adenosine-3'-phosphate
  modified_base 12: mod_base = OTHER; note = guanosine-3'-phosphate
  modified_base 13: mod_base = OTHER; note = adenosine-3'-phosphate
  modified_base 14: mod_base = OTHER; note = adenosine-3'-phosphate
  modified_base 15: mod_base = OTHER; note = adenosine-3'-phosphate
  modified_base 16: mod_base = OTHER; note = guanosine-3'-phosphate
  modified_base 17: mod_base = OTHER; note = adenosine-3'-phosphate
  modified_base 18: mod_base = OTHER; note = guanosine-3'-phosphate
  modified_base 19: mod_base = OTHER; note = adenosine-3'-phosphate
  misc_feature 1..19: note = RNA
  misc_feature 20..21: note = DNA
aaccactgccagaaagagatt

SEQ ID NO: 1352 - DNA, 21 bp, synthetic construct
  source 1..21: mol_type = other DNA
  modified_base 1: mod_base = OTHER; note = cytidine-3'-phosphate
  modified_base 2: mod_base = OTHER; note = adenosine-3'-phosphate
  modified_base 3: mod_base = OTHER; note = guanosine-3'-phosphate
  modified_base 4: mod_base = OTHER; note = adenosine-3'-phosphate
  modified_base 5: mod_base = OTHER; note = adenosine-3'-phosphate
  modified_base 6: mod_base = OTHER; note = adenosine-3'-phosphate
  modified_base 7: mod_base = OTHER; note = guanosine-3'-phosphate
  modified_base 8: mod_base = OTHER; note = adenosine-3'-phosphate
  modified_base 9: mod_base = OTHER; note = guanosine-3'-phosphate
  modified_base 10: mod_base = OTHER; note = adenosine-3'-phosphate
  modified_base 11: mod_base = OTHER; note = adenosine-3'-phosphate
  modified_base 12: mod_base = OTHER; note = guanosine-3'-phosphate
  modified_base 13: mod_base = OTHER; note = uridine-3'-phosphate
  modified_base 14: mod_base = OTHER; note = guanosine-3'-phosphate
  modified_base 15: mod_base = OTHER; note = cytidine-3'-phosphate
  modified_base 16: mod_base = OTHER; note = uridine-3'-phosphate
  modified_base 17: mod_base = OTHER; note = uridine-3'-phosphate
  modified_base 18: mod_base = OTHER; note = uridine-3'-phosphate
  modified_base 19: mod_base = OTHER; note = adenosine-3'-phosphate
  misc_feature 1..19: note = RNA
  misc_feature 20..21: note = DNA
cagaaagagaagtgctttatt

SEQ ID NO: 1353 - DNA, 21 bp, synthetic construct
  source 1..21: mol_type = other DNA
  modified_base 1: mod_base = OTHER; note = uridine-3'-phosphate
  modified_base 2: mod_base = OTHER; note = guanosine-3'-phosphate
  modified_base 3: mod_base = OTHER; note = cytidine-3'-phosphate
  modified_base 4: mod_base = OTHER; note = uridine-3'-phosphate
  modified_base 5: mod_base = OTHER; note = uridine-3'-phosphate
  modified_base 6: mod_base = OTHER; note = uridine-3'-phosphate
  modified_base 7: mod_base = OTHER; note = guanosine-3'-phosphate
  modified_base 8: mod_base = OTHER; note = adenosine-3'-phosphate
  modified_base 9: mod_base = OTHER; note = guanosine-3'-phosphate
  modified_base 10: mod_base = OTHER; note = cytidine-3'-phosphate
  modified_base 11: mod_base = OTHER; note = cytidine-3'-phosphate
  modified_base 12: mod_base = OTHER; note = uridine-3'-phosphate
  modified_base 13: mod_base = OTHER; note = cytidine-3'-phosphate
  modified_base 14: mod_base = OTHER; note = adenosine-3'-phosphate
  modified_base 15: mod_base = OTHER; note = guanosine-3'-phosphate
  modified_base 16: mod_base = OTHER; note = cytidine-3'-phosphate
  modified_base 17: mod_base = OTHER; note = uridine-3'-phosphate
  modified_base 18: mod_base = OTHER; note = uridine-3'-phosphate
  modified_base 19: mod_base = OTHER; note = adenosine-3'-phosphate
  misc_feature 1..19: note = RNA
  misc_feature 20..21: note = DNA
tgctttgagcctcagcttatt

SEQ ID NO: 1354 - DNA, 21 bp, synthetic construct
  source 1..21: mol_type = other DNA
  modified_base 1: mod_base = OTHER; note = cytidine-3'-phosphate
  modified_base 2: mod_base = OTHER; note = adenosine-3'-phosphate
  modified_base 3: mod_base = OTHER; note = guanosine-3'-phosphate
  modified_base 4: mod_base = OTHER; note = cytidine-3'-phosphate
  modified_base 5: mod_base = OTHER; note = uridine-3'-phosphate
  modified_base 6: mod_base = OTHER; note = uridine-3'-phosphate
  modified_base 7: mod_base = OTHER; note = cytidine-3'-phosphate
  modified_base 8: mod_base = OTHER; note = uridine-3'-phosphate
  modified_base 9: mod_base = OTHER; note = cytidine-3'-phosphate
  modified_base 10: mod_base = OTHER; note = cytidine-3'-phosphate
  modified_base 11: mod_base = OTHER; note = guanosine-3'-phosphate
  modified_base 12: mod_base = OTHER; note = guanosine-3'-phosphate
  modified_base 13: mod_base = OTHER; note = uridine-3'-phosphate
  modified_base 14: mod_base = OTHER; note = uridine-3'-phosphate
  modified_base 15: mod_base = OTHER; note = uridine-3'-phosphate
  modified_base 16: mod_base = OTHER; note = uridine-3'-phosphate
  modified_base 17: mod_base = OTHER; note = uridine-3'-phosphate
  modified_base 18: mod_base = OTHER; note = cytidine-3'-phosphate
  modified_base 19: mod_base = OTHER; note = adenosine-3'-phosphate
  misc_feature 1..19: note = RNA
  misc_feature 20..21: note = DNA
cagcttctccggtttttcatt

SEQ ID NO: 1355 - DNA, 21 bp, synthetic construct
  source 1..21: mol_type = other DNA
  modified_base 1: mod_base = OTHER; note = cytidine-3'-phosphate
  modified_base 2: mod_base = OTHER; note = guanosine-3'-phosphate
  modified_base 3: mod_base = OTHER; note = guanosine-3'-phosphate
  modified_base 4: mod_base = OTHER; note = uridine-3'-phosphate
  modified_base 5: mod_base = OTHER; note = uridine-3'-phosphate
  modified_base 6: mod_base = OTHER; note = uridine-3'-phosphate
  modified_base 7: mod_base = OTHER; note = uridine-3'-phosphate
  modified_base 8: mod_base = OTHER; note = uridine-3'-phosphate
  modified_base 9: mod_base = OTHER; note = cytidine-3'-phosphate
  modified_base 10: mod_base = OTHER; note = cytidine-3'-phosphate
  modified_base 11: mod_base = OTHER; note = adenosine-3'-phosphate
  modified_base 12: mod_base = OTHER; note = cytidine-3'-phosphate
  modified_base 13: mod_base = OTHER; note = adenosine-3'-phosphate
  modified_base 14: mod_base = OTHER; note = adenosine-3'-phosphate
  modified_base 15: mod_base = OTHER; note = guanosine-3'-phosphate
  modified_base 16: mod_base = OTHER; note = adenosine-3'-phosphate
  modified_base 17: mod_base = OTHER; note = adenosine-3'-phosphate
  modified_base 18: mod_base = OTHER; note = uridine-3'-phosphate
  modified_base 19: mod_base = OTHER; note = adenosine-3'-phosphate
  misc_feature 1..19: note = RNA
  misc_feature 20..21: note = DNA
cggtttttccacaagaatatt

SEQ ID NO: 1356 - DNA, 21 bp, synthetic construct
  source 1..21: mol_type = other DNA
  modified_base 1: mod_base = OTHER; note = cytidine-3'-phosphate
  modified_base 2: mod_base = OTHER; note = adenosine-3'-phosphate
  modified_base 3: mod_base = OTHER; note = adenosine-3'-phosphate
  modified_base 4: mod_base = OTHER; note = guanosine-3'-phosphate
  modified_base 5: mod_base = OTHER; note = adenosine-3'-phosphate
  modified_base 6: mod_base = OTHER; note = adenosine-3'-phosphate
  modified_base 7: mod_base = OTHER; note = uridine-3'-phosphate
  modified_base 8: mod_base = OTHER; note = guanosine-3'-phosphate
  modified_base 9: mod_base = OTHER; note = adenosine-3'-phosphate
  modified_base 10: mod_base = OTHER; note = guanosine-3'-phosphate
  modified_base 11: mod_base = OTHER; note = adenosine-3'-phosphate
  modified_base 12: mod_base = OTHER; note = uridine-3'-phosphate
  modified_base 13: mod_base = OTHER; note = adenosine-3'-phosphate
  modified_base 14: mod_base = OTHER; note = uridine-3'-phosphate
  modified_base 15: mod_base = OTHER; note = guanosine-3'-phosphate
  modified_base 16: mod_base = OTHER; note = guanosine-3'-phosphate
  modified_base 17: mod_base = OTHER; note = uridine-3'-phosphate
  modified_base 18: mod_base = OTHER; note = adenosine-3'-phosphate
  modified_base 19: mod_base = OTHER; note = uridine-3'-phosphate
  misc_feature 1..19: note = RNA
  misc_feature 20..21: note = DNA
caagaatgagatatggtattt

SEQ ID NO: 1357 - DNA, 21 bp, synthetic construct
  source 1..21: mol_type = other DNA
  modified_base 1: mod_base = OTHER; note = uridine-3'-phosphate
  modified_base 2: mod_base = OTHER; note = adenosine-3'-phosphate
  modified_base 3: mod_base = OTHER; note = uridine-3'-phosphate
  modified_base 4: mod_base = OTHER; note = guanosine-3'-phosphate
  modified_base 5: mod_base = OTHER; note = guanosine-3'-phosphate
  modified_base 6: mod_base = OTHER; note = uridine-3'-phosphate
  modified_base 7: mod_base = OTHER; note = adenosine-3'-phosphate
  modified_base 8: mod_base = OTHER; note = uridine-3'-phosphate
  modified_base 9: mod_base = OTHER; note = adenosine-3'-phosphate
  modified_base 10: mod_base = OTHER; note = guanosine-3'-phosphate
  modified_base 11: mod_base = OTHER; note = adenosine-3'-phosphate
  modified_base 12: mod_base = OTHER; note = adenosine-3'-phosphate
  modified_base 13: mod_base = OTHER; note = cytidine-3'-phosphate
  modified_base 14: mod_base = OTHER; note = uridine-3'-phosphate
  modified_base 15: mod_base = OTHER; note = guanosine-3'-phosphate
  modified_base 16: mod_base = OTHER; note = adenosine-3'-phosphate
  modified_base 17: mod_base = OTHER; note = guanosine-3'-phosphate
  modified_base 18: mod_base = OTHER; note = cytidine-3'-phosphate
  modified_base 19: mod_base = OTHER; note = adenosine-3'-phosphate
  misc_feature 1..19: note = RNA
  misc_feature 20..21: note = DNA
tatggtatagaactgagcatt

SEQ ID NO: 1358 - DNA, 21 bp, synthetic construct
  source 1..21: mol_type = other DNA
  modified_base 1: mod_base = OTHER; note = uridine-3'-phosphate
  modified_base 2: mod_base = OTHER; note = guanosine-3'-phosphate
  modified_base 3: mod_base = OTHER; note = adenosine-3'-phosphate
  modified_base 4: mod_base = OTHER; note = guanosine-3'-phosphate
  modified_base 5: mod_base = OTHER; note = cytidine-3'-phosphate
  modified_base 6: mod_base = OTHER; note = adenosine-3'-phosphate
  modified_base 7: mod_base = OTHER; note = adenosine-3'-phosphate
  modified_base 8: mod_base = OTHER; note = guanosine-3'-phosphate
  modified_base 9: mod_base = OTHER; note = cytidine-3'-phosphate
  modified_base 10: mod_base = OTHER; note = adenosine-3'-phosphate
  modified_base 11: mod_base = OTHER; note = guanosine-3'-phosphate
  modified_base 12: mod_base = OTHER; note = cytidine-3'-phosphate
  modified_base 13: mod_base = OTHER; note = uridine-3'-phosphate
  modified_base 14: mod_base = OTHER; note = guanosine-3'-phosphate
  modified_base 15: mod_base = OTHER; note = uridine-3'-phosphate
  modified_base 16: mod_base = OTHER; note = guanosine-3'-phosphate
  modified_base 17: mod_base = OTHER; note = guanosine-3'-phosphate
  modified_base 18: mod_base = OTHER; note = cytidine-3'-phosphate
  modified_base 19: mod_base = OTHER; note = adenosine-3'-phosphate
  misc_feature 1..19: note = RNA
  misc_feature 20..21: note = DNA
tgagcaagcagctgtggcatt

SEQ ID NO: 1359 - DNA, 21 bp, synthetic construct
  source 1..21: mol_type = other DNA
  modified_base 1: mod_base = OTHER; note = guanosine-3'-phosphate
  modified_base 2: mod_base = OTHER; note = cytidine-3'-phosphate
  modified_base 3: mod_base = OTHER; note = uridine-3'-phosphate
  modified_base 4: mod_base = OTHER; note = guanosine-3'-phosphate
  modified_base 5: mod_base = OTHER; note = uridine-3'-phosphate
  modified_base 6: mod_base = OTHER; note = guanosine-3'-phosphate
  modified_base 7: mod_base = OTHER; note = guanosine-3'-phosphate
  modified_base 8: mod_base = OTHER; note = cytidine-3'-phosphate
  modified_base 9: mod_base = OTHER; note = cytidine-3'-phosphate
  modified_base 10: mod_base = OTHER; note = adenosine-3'-phosphate
  modified_base 11: mod_base = OTHER; note = guanosine-3'-phosphate
  modified_base 12: mod_base = OTHER; note = adenosine-3'-phosphate
  modified_base 13: mod_base = OTHER; note = uridine-3'-phosphate
  modified_base 14: mod_base = OTHER; note = guanosine-3'-phosphate
  modified_base 15: mod_base = OTHER; note = cytidine-3'-phosphate
  modified_base 16: mod_base = OTHER; note = cytidine-3'-phosphate
  modified_base 17: mod_base = OTHER; note = adenosine-3'-phosphate
  modified_base 18: mod_base = OTHER; note = guanosine-3'-phosphate
  modified_base 19: mod_base = OTHER; note = uridine-3'-phosphate
  misc_feature 1..19: note = RNA
  misc_feature 20..21: note = DNA
gctgtggccagatgccagttt

SEQ ID NO: 1360 - DNA, 21 bp, synthetic construct
  source 1..21: mol_type = other DNA
  modified_base 1: mod_base = OTHER; note = adenosine-3'-phosphate
  modified_base 2: mod_base = OTHER; note = uridine-3'-phosphate
  modified_base 3: mod_base = OTHER; note = guanosine-3'-phosphate
  modified_base 4: mod_base = OTHER; note = cytidine-3'-phosphate
  modified_base 5: mod_base = OTHER; note = cytidine-3'-phosphate
  modified_base 6: mod_base = OTHER; note = adenosine-3'-phosphate
  modified_base 7: mod_base = OTHER; note = guanosine-3'-phosphate
  modified_base 8: mod_base = OTHER; note = uridine-3'-phosphate
  modified_base 9: mod_base = OTHER; note = guanosine-3'-phosphate
  modified_base 10: mod_base = OTHER; note = cytidine-3'-phosphate
  modified_base 11: mod_base = OTHER; note = adenosine-3'-phosphate
  modified_base 12: mod_base = OTHER; note = adenosine-3'-phosphate
  modified_base 13: mod_base = OTHER; note = guanosine-3'-phosphate
  modified_base 14: mod_base = OTHER; note = guanosine-3'-phosphate
  modified_base 15: mod_base = OTHER; note = guanosine-3'-phosphate
  modified_base 16: mod_base = OTHER; note = uridine-3'-phosphate
  modified_base 17: mod_base = OTHER; note = cytidine-3'-phosphate
  modified_base 18: mod_base = OTHER; note = cytidine-3'-phosphate
  modified_base 19: mod_base = OTHER; note = uridine-3'-phosphate
  misc_feature 1..19: note = RNA
  misc_feature 20..21: note = DNA
atgccagtgcaagggtccttt

SEQ ID NO: 1361 - DNA, 21 bp, synthetic construct
  source 1..21: mol_type = other DNA
  modified_base 1: mod_base = OTHER; note = adenosine-3'-phosphate
  modified_base 2: mod_base = OTHER; note = adenosine-3'-phosphate
  modified_base 3: mod_base = OTHER; note = guanosine-3'-phosphate
  modified_base 4: mod_base = OTHER; note = guanosine-3'-phosphate
  modified_base 5: mod_base = OTHER; note = guanosine-3'-phosphate
  modified_base 6: mod_base = OTHER; note = uridine-3'-phosphate
  modified_base 7: mod_base = OTHER; note = cytidine-3'-phosphate
  modified_base 8: mod_base = OTHER; note = cytidine-3'-phosphate
  modified_base 9: mod_base = OTHER; note = uridine-3'-phosphate
  modified_base 10: mod_base = OTHER; note = guanosine-3'-phosphate
  modified_base 11: mod_base = OTHER; note = adenosine-3'-phosphate
  modified_base 12: mod_base = OTHER; note = uridine-3'-phosphate
  modified_base 13: mod_base = OTHER; note = guanosine-3'-phosphate
  modified_base 14: mod_base = OTHER; note = cytidine-3'-phosphate
  modified_base 15: mod_base = OTHER; note = cytidine-3'-phosphate
  modified_base 16: mod_base = OTHER; note = cytidine-3'-phosphate
  modified_base 17: mod_base = OTHER; note = adenosine-3'-phosphate
  modified_base 18: mod_base = OTHER; note = cytidine-3'-phosphate
  modified_base 19: mod_base = OTHER; note = uridine-3'-phosphate
  misc_feature 1..19: note = RNA
  misc_feature 20..21: note = DNA
aagggtcctgatgcccacttt

SEQ ID NO: 1362 - DNA, 21 bp, synthetic construct
  source 1..21: mol_type = other DNA
  modified_base 1: mod_base = OTHER; note = uridine-3'-phosphate
  modified_base 2: mod_base = OTHER; note = guanosine-3'-phosphate
  modified_base 3: mod_base = OTHER; note = cytidine-3'-phosphate
  modified_base 4: mod_base = OTHER; note = cytidine-3'-phosphate
  modified_base 5: mod_base = OTHER; note = cytidine-3'-phosphate
  modified_base 6: mod_base = OTHER; note = adenosine-3'-phosphate
  modified_base 7: mod_base = OTHER; note = cytidine-3'-phosphate
  modified_base 8: mod_base = OTHER; note = uridine-3'-phosphate
  modified_base 9: mod_base = OTHER; note = guanosine-3'-phosphate
  modified_base 10: mod_base = OTHER; note = cytidine-3'-phosphate
  modified_base 11: mod_base = OTHER; note = cytidine-3'-phosphate
  modified_base 12: mod_base = OTHER; note = adenosine-3'-phosphate
  modified_base 13: mod_base = OTHER; note = guanosine-3'-phosphate
  modified_base 14: mod_base = OTHER; note = cytidine-3'-phosphate
  modified_base 15: mod_base = OTHER; note = guanosine-3'-phosphate
  modified_base 16: mod_base = OTHER; note = guanosine-3'-phosphate
  modified_base 17: mod_base = OTHER; note = cytidine-3'-phosphate
  modified_base 18: mod_base = OTHER; note = uridine-3'-phosphate
  modified_base 19: mod_base = OTHER; note = adenosine-3'-phosphate
  misc_feature 1..19: note = RNA
  misc_feature 20..21: note = DNA
tgcccactgccagcggctatt

SEQ ID NO: 1363 - DNA, 21 bp, synthetic construct
  source 1..21: mol_type = other DNA
  modified_base 1: mod_base = OTHER; note = cytidine-3'-phosphate
  modified_base 2: mod_base = OTHER; note = guanosine-3'-phosphate
  modified_base 3: mod_base = OTHER; note = guanosine-3'-phosphate
  modified_base 4: mod_base = OTHER; note = cytidine-3'-phosphate
  modified_base 5: mod_base = OTHER; note = uridine-3'-phosphate
  modified_base 6: mod_base = OTHER; note = guanosine-3'-phosphate
  modified_base 7: mod_base = OTHER; note = guanosine-3'-phosphate
  modified_base 8: mod_base = OTHER; note = cytidine-3'-phosphate
  modified_base 9: mod_base = OTHER; note = cytidine-3'-phosphate
  modified_base 10: mod_base = OTHER; note = adenosine-3'-phosphate
  modified_base 11: mod_base = OTHER; note = guanosine-3'-phosphate
  modified_base 12: mod_base = OTHER; note = cytidine-3'-phosphate
  modified_base 13: mod_base = OTHER; note = cytidine-3'-phosphate
  modified_base 14: mod_base = OTHER; note = adenosine-3'-phosphate
  modified_base 15: mod_base = OTHER; note = guanosine-3'-phosphate
  modified_base 16: mod_base = OTHER; note = guanosine-3'-phosphate
  modified_base 17: mod_base = OTHER; note = cytidine-3'-phosphate
  modified_base 18: mod_base = OTHER; note = cytidine-3'-phosphate
  modified_base 19: mod_base = OTHER; note = uridine-3'-phosphate
  misc_feature 1..19: note = RNA
  misc_feature 20..21: note = DNA
cggctggccagccaggccttt

SEQ ID NO: 1364 - DNA, 21 bp, synthetic construct
  source 1..21: mol_type = other DNA
  modified_base 1: mod_base = OTHER; note = adenosine-3'-phosphate
  modified_base 2: mod_base = OTHER; note = guanosine-3'-phosphate
  modified_base 3: mod_base = OTHER; note = cytidine-3'-phosphate
  modified_base 4: mod_base = OTHER; note = cytidine-3'-phosphate
  modified_base 5: mod_base = OTHER; note = adenosine-3'-phosphate
  modified_base 6: mod_base = OTHER; note = guanosine-3'-phosphate
  modified_base 7: mod_base = OTHER; note = guanosine-3'-phosphate
  modified_base 8: mod_base = OTHER; note = cytidine-3'-phosphate
  modified_base 9: mod_base = OTHER; note = cytidine-3'-phosphate
  modified_base 10: mod_base = OTHER; note = uridine-3'-phosphate
  modified_base 11: mod_base = OTHER; note = guanosine-3'-phosphate
  modified_base 12: mod_base = OTHER; note = cytidine-3'-phosphate
  modified_base 13: mod_base = OTHER; note = cytidine-3'-phosphate
  modified_base 14: mod_base = OTHER; note = guanosine-3'-phosphate
  modified_base 15: mod_base = OTHER; note = cytidine-3'-phosphate
  modified_base 16: mod_base = OTHER; note = adenosine-3'-phosphate
  modified_base 17: mod_base = OTHER; note = cytidine-3'-phosphate
  modified_base 18: mod_base = OTHER; note = cytidine-3'-phosphate
  modified_base 19: mod_base = OTHER; note = adenosine-3'-phosphate
  misc_feature 1..19: note = RNA
  misc_feature 20..21: note = DNA
agccaggcctgccgcaccatt

SEQ ID NO: 1365 - DNA, 21 bp, synthetic construct
  source 1..21: mol_type = other DNA
  modified_base 1: mod_base = OTHER; note = cytidine-3'-phosphate
  modified_base 2: mod_base = OTHER; note = guanosine-3'-phosphate
  modified_base 3: mod_base = OTHER; note = cytidine-3'-phosphate
  modified_base 4: mod_base = OTHER; note = adenosine-3'-phosphate
  modified_base 5: mod_base = OTHER; note = cytidine-3'-phosphate
  modified_base 6: mod_base = OTHER; note = cytidine-3'-phosphate
  modified_base 7: mod_base = OTHER; note = adenosine-3'-phosphate
  modified_base 8: mod_base = OTHER; note = adenosine-3'-phosphate
  modified_base 9: mod_base = OTHER; note = cytidine-3'-phosphate
  modified_base 10: mod_base = OTHER; note = cytidine-3'-phosphate
  modified_base 11: mod_base = OTHER; note = cytidine-3'-phosphate
  modified_base 12: mod_base = OTHER; note = guanosine-3'-phosphate
  modified_base 13: mod_base = OTHER; note = uridine-3'-phosphate
  modified_base 14: mod_base = OTHER; note = guanosine-3'-phosphate
  modified_base 15: mod_base = OTHER; note = cytidine-3'-phosphate
  modified_base 16: mod_base = OTHER; note = cytidine-3'-phosphate
  modified_base 17: mod_base = OTHER; note = uridine-3'-phosphate
  modified_base 18: mod_base = OTHER; note = cytidine-3'-phosphate
  modified_base 19: mod_base = OTHER; note = adenosine-3'-phosphate
  misc_feature 1..19: note = RNA
  misc_feature 20..21: note = DNA
cgcaccaacccgtgcctcatt

SEQ ID NO: 1366 - DNA, 21 bp, synthetic construct
  source 1..21: mol_type = other DNA
  modified_base 1: mod_base = OTHER; note = uridine-3'-phosphate
  modified_base 2: mod_base = OTHER; note = guanosine-3'-phosphate
  modified_base 3: mod_base = OTHER; note = cytidine-3'-phosphate
  modified_base 4: mod_base = OTHER; note = cytidine-3'-phosphate
  modified_base 5: mod_base = OTHER; note = uridine-3'-phosphate
  modified_base 6: mod_base = OTHER; note = cytidine-3'-phosphate
  modified_base 7: mod_base = OTHER; note = cytidine-3'-phosphate
  modified_base 8: mod_base = OTHER; note = adenosine-3'-phosphate
  modified_base 9: mod_base = OTHER; note = uridine-3'-phosphate
  modified_base 10: mod_base = OTHER; note = guanosine-3'-phosphate
  modified_base 11: mod_base = OTHER; note = guanosine-3'-phosphate
  modified_base 12: mod_base = OTHER; note = guanosine-3'-phosphate
  modified_base 13: mod_base = OTHER; note = guanosine-3'-phosphate
  modified_base 14: mod_base = OTHER; note = guanosine-3'-phosphate
  modified_base 15: mod_base = OTHER; note = uridine-3'-phosphate
  modified_base 16: mod_base = OTHER; note = cytidine-3'-phosphate
  modified_base 17: mod_base = OTHER; note = guanosine-3'-phosphate
  modified_base 18: mod_base = OTHER; note = cytidine-3'-phosphate
  modified_base 19: mod_base = OTHER; note = uridine-3'-phosphate
  misc_feature 1..19: note = RNA
  misc_feature 20..21: note = DNA
tgcctccatgggggtcgcttt

SEQ ID NO: 1367 - DNA, 21 bp, synthetic construct
  source 1..21: mol_type = other DNA
  modified_base 1: mod_base = OTHER; note = guanosine-3'-phosphate
  modified_base 2: mod_base = OTHER; note = guanosine-3'-phosphate
  modified_base 3: mod_base = OTHER; note = guanosine-3'-phosphate
  modified_base 4: mod_base = OTHER; note = guanosine-3'-phosphate
  modified_base 5: mod_base = OTHER; note = uridine-3'-phosphate
  modified_base 6: mod_base = OTHER; note = cytidine-3'-phosphate
  modified_base 7: mod_base = OTHER; note = guanosine-3'-phosphate
  modified_base 8: mod_base = OTHER; note = cytidine-3'-phosphate
  modified_base 9: mod_base = OTHER; note = uridine-3'-phosphate
  modified_base 10: mod_base = OTHER; note = guanosine-3'-phosphate
  modified_base 11: mod_base = OTHER; note = cytidine-3'-phosphate
  modified_base 12: mod_base = OTHER; note = cytidine-3'-phosphate
  modified_base 13: mod_base = OTHER; note = uridine-3'-phosphate
  modified_base 14: mod_base = OTHER; note = adenosine-3'-phosphate
  modified_base 15: mod_base = OTHER; note = guanosine-3'-phosphate
  modified_base 16: mod_base = OTHER; note = adenosine-3'-phosphate
  modified_base 17: mod_base = OTHER; note = guanosine-3'-phosphate
  modified_base 18: mod_base = OTHER; note = guanosine-3'-phosphate
  modified_base 19: mod_base = OTHER; note = uridine-3'-phosphate
  misc_feature 1..19: note = RNA
  misc_feature 20..21: note = DNA
ggggtcgctgcctagaggttt

SEQ ID NO: 1368 - DNA, 21 bp, synthetic construct
  source 1..21: mol_type = other DNA
  modified_base 1: mod_base = OTHER; note = cytidine-3'-phosphate
  modified_base 2: mod_base = OTHER; note = uridine-3'-phosphate
  modified_base 3: mod_base = OTHER; note = adenosine-3'-phosphate
  modified_base 4: mod_base = OTHER; note = guanosine-3'-phosphate
  modified_base 5: mod_base = OTHER; note = adenosine-3'-phosphate
  modified_base 6: mod_base = OTHER; note = guanosine-3'-phosphate
  modified_base 7: mod_base = OTHER; note = guanosine-3'-phosphate
  modified_base 8: mod_base = OTHER; note = uridine-3'-phosphate
  modified_base 9: mod_base = OTHER; note = guanosine-3'-phosphate
  modified_base 10: mod_base = OTHER; note = guanosine-3'-phosphate
  modified_base 11: mod_base = OTHER; note = adenosine-3'-phosphate
  modified_base 12: mod_base = OTHER; note = guanosine-3'-phosphate
  modified_base 13: mod_base = OTHER; note = guanosine-3'-phosphate
  modified_base 14: mod_base = OTHER; note = guanosine-3'-phosphate
  modified_base 15: mod_base = OTHER; note = cytidine-3'-phosphate
  modified_base 16: mod_base = OTHER; note = cytidine-3'-phosphate
  modified_base 17: mod_base = OTHER; note = adenosine-3'-phosphate
  modified_base 18: mod_base = OTHER; note = cytidine-3'-phosphate
  modified_base 19: mod_base = OTHER; note = adenosine-3'-phosphate
  misc_feature 1..19: note = RNA
  misc_feature 20..21: note = DNA
ctagaggtggagggccacatt

SEQ ID NO: 1369 - DNA, 21 bp, synthetic construct
  source 1..21: mol_type = other DNA
  modified_base 1: mod_base = OTHER; note = adenosine-3'-phosphate
  modified_base 2: mod_base = OTHER; note = guanosine-3'-phosphate
  modified_base 3: mod_base = OTHER; note = guanosine-3'-phosphate
  modified_base 4: mod_base = OTHER; note = guanosine-3'-phosphate
  modified_base 5: mod_base = OTHER; note = cytidine-3'-phosphate
  modified_base 6: mod_base = OTHER; note = cytidine-3'-phosphate
  modified_base 7: mod_base = OTHER; note = adenosine-3'-phosphate
  modified_base 8: mod_base = OTHER; note = cytidine-3'-phosphate
  modified_base 9: mod_base = OTHER; note = cytidine-3'-phosphate
  modified_base 10: mod_base = OTHER; note = guanosine-3'-phosphate
  modified_base 11: mod_base = OTHER; note = cytidine-3'-phosphate
  modified_base 12: mod_base = OTHER; note = cytidine-3'-phosphate
  modified_base 13: mod_base = OTHER; note = uridine-3'-phosphate
  modified_base 14: mod_base = OTHER; note = guanosine-3'-phosphate
  modified_base 15: mod_base = OTHER; note = uridine-3'-phosphate
  modified_base 16: mod_base = OTHER; note = guanosine-3'-phosphate
  modified_base 17: mod_base = OTHER; note = cytidine-3'-phosphate
  modified_base 18: mod_base = OTHER; note = cytidine-3'-phosphate
  modified_base 19: mod_base = OTHER; note = adenosine-3'-phosphate
  misc_feature 1..19: note = RNA
  misc_feature 20..21: note = DNA
agggccaccgcctgtgccatt

SEQ ID NO: 1370 - DNA, 21 bp, synthetic construct
  source 1..21: mol_type = other DNA
  modified_base 1: mod_base = OTHER; note = uridine-3'-phosphate
  modified_base 2: mod_base = OTHER; note = guanosine-3'-phosphate
  modified_base 3: mod_base = OTHER; note = uridine-3'-phosphate
  modified_base 4: mod_base = OTHER; note = guanosine-3'-phosphate
  modified_base 5: mod_base = OTHER; note = cytidine-3'-phosphate
  modified_base 6: mod_base = OTHER; note = cytidine-3'-phosphate
  modified_base 7: mod_base = OTHER; note = adenosine-3'-phosphate
  modified_base 8: mod_base = OTHER; note = cytidine-3'-phosphate
  modified_base 9: mod_base = OTHER; note = uridine-3'-phosphate
  modified_base 10: mod_base = OTHER; note = guanosine-3'-phosphate
  modified_base 11: mod_base = OTHER; note = cytidine-3'-phosphate
  modified_base 12: mod_base = OTHER; note = cytidine-3'-phosphate
  modified_base 13: mod_base = OTHER; note = cytidine-3'-phosphate
  modified_base 14: mod_base = OTHER; note = guanosine-3'-phosphate
  modified_base 15: mod_base = OTHER; note = guanosine-3'-phosphate
  modified_base 16: mod_base = OTHER; note = uridine-3'-phosphate
  modified_base 17: mod_base = OTHER; note = guanosine-3'-phosphate
  modified_base 18: mod_base = OTHER; note = guanosine-3'-phosphate
  modified_base 19: mod_base = OTHER; note = adenosine-3'-phosphate
  misc_feature 1..19: note = RNA
  misc_feature 20..21: note = DNA
tgtgccactgcccggtggatt

SEQ ID NO: 1371 - DNA, 21 bp, synthetic construct
  source 1..21: mol_type = other DNA
  modified_base 1: mod_base = OTHER; note = cytidine-3'-phosphate
  modified_base 2: mod_base = OTHER; note = guanosine-3'-phosphate
  modified_base 3: mod_base = OTHER; note = guanosine-3'-phosphate
  modified_base 4: mod_base = OTHER; note = uridine-3'-phosphate
  modified_base 5: mod_base = OTHER; note = guanosine-3'-phosphate
  modified_base 6: mod_base = OTHER; note = guanosine-3'-phosphate
  modified_base 7: mod_base = OTHER; note = guanosine-3'-phosphate
  modified_base 8: mod_base = OTHER; note = cytidine-3'-phosphate
  modified_base 9: mod_base = OTHER; note = uridine-3'-phosphate
  modified_base 10: mod_base = OTHER; note = adenosine-3'-phosphate
  modified_base 11: mod_base = OTHER; note = cytidine-3'-phosphate
  modified_base 12: mod_base = OTHER; note = adenosine-3'-phosphate
  modified_base 13: mod_base = OTHER; note = cytidine-3'-phosphate
  modified_base 14: mod_base = OTHER; note = cytidine-3'-phosphate
  modified_base 15: mod_base = OTHER; note = guanosine-3'-phosphate
  modified_base 16: mod_base = OTHER; note = guanosine-3'-phosphate
  modified_base 17: mod_base = OTHER; note = adenosine-3'-phosphate
  modified_base 18: mod_base = OTHER; note = guanosine-3'-phosphate
  modified_base 19: mod_base = OTHER; note = adenosine-3'-phosphate
  misc_feature 1..19: note = RNA
  misc_feature 20..21: note = DNA
cggtgggctacaccggagatt

SEQ ID NO: 1372 - DNA, 21 bp, synthetic construct
  source 1..21: mol_type = other DNA
  modified_base 1: mod_base = OTHER; note = adenosine-3'-phosphate
  modified_base 2: mod_base = OTHER; note = cytidine-3'-phosphate
  modified_base 3: mod_base = OTHER; note = cytidine-3'-phosphate
  modified_base 4: mod_base = OTHER; note = guanosine-3'-phosphate
  modified_base 5: mod_base = OTHER; note = guanosine-3'-phosphate
  modified_base 6: mod_base = OTHER; note = adenosine-3'-phosphate
  modified_base 7: mod_base = OTHER; note = guanosine-3'-phosphate
  modified_base 8: mod_base = OTHER; note = cytidine-3'-phosphate
  modified_base 9: mod_base = OTHER; note = cytidine-3'-phosphate
  modified_base 10: mod_base = OTHER; note = uridine-3'-phosphate
  modified_base 11: mod_base = OTHER; note = uridine-3'-phosphate
  modified_base 12: mod_base = OTHER; note = cytidine-3'-phosphate
  modified_base 13: mod_base = OTHER; note = uridine-3'-phosphate
  modified_base 14: mod_base = OTHER; note = guanosine-3'-phosphate
  modified_base 15: mod_base = OTHER; note = cytidine-3'-phosphate
  modified_base 16: mod_base = OTHER; note = guanosine-3'-phosphate
  modified_base 17: mod_base = OTHER; note = adenosine-3'-phosphate
  modified_base 18: mod_base = OTHER; note = cytidine-3'-phosphate
  modified_base 19: mod_base = OTHER; note = adenosine-3'-phosphate
  misc_feature 1..19: note = RNA
  misc_feature 20..21: note = DNA
accggagccttctgcgacatt

SEQ ID NO: 1373 - DNA, 21 bp, synthetic construct
  source 1..21: mol_type = other DNA
  modified_base 1: mod_base = OTHER; note = uridine-3'-phosphate
  modified_base 2: mod_base = OTHER; note = uridine-3'-phosphate
  modified_base 3: mod_base = OTHER; note = cytidine-3'-phosphate
  modified_base 4: mod_base = OTHER; note = uridine-3'-phosphate
  modified_base 5: mod_base = OTHER; note = guanosine-3'-phosphate
  modified_base 6: mod_base = OTHER; note = cytidine-3'-phosphate
  modified_base 7: mod_base = OTHER; note = guanosine-3'-phosphate
  modified_base 8: mod_base = OTHER; note = adenosine-3'-phosphate
  modified_base 9: mod_base = OTHER; note = cytidine-3'-phosphate
  modified_base 10: mod_base = OTHER; note = guanosine-3'-phosphate
  modified_base 11: mod_base = OTHER; note = uridine-3'-phosphate
  modified_base 12: mod_base = OTHER; note = guanosine-3'-phosphate
  modified_base 13: mod_base = OTHER; note = guanosine-3'-phosphate
  modified_base 14: mod_base = OTHER; note = adenosine-3'-phosphate
  modified_base 15: mod_base = OTHER; note = cytidine-3'-phosphate
  modified_base 16: mod_base = OTHER; note = adenosine-3'-phosphate
  modified_base 17: mod_base = OTHER; note = cytidine-3'-phosphate
  modified_base 18: mod_base = OTHER; note = cytidine-3'-phosphate
  modified_base 19: mod_base = OTHER; note = adenosine-3'-phosphate
  misc_feature 1..19: note = RNA
  misc_feature 20..21: note = DNA
ttctgcgacgtggacaccatt

SEQ ID NO: 1374 - DNA, 21 bp, synthetic construct
  source 1..21: mol_type = other DNA
  modified_base 1: mod_base = OTHER; note = guanosine-3'-phosphate
  modified_base 2: mod_base = OTHER; note = adenosine-3'-phosphate
  modified_base 3: mod_base = OTHER; note = cytidine-3'-phosphate
  modified_base 4: mod_base = OTHER; note = adenosine-3'-phosphate
  modified_base 5: mod_base = OTHER; note = cytidine-3'-phosphate
  modified_base 6: mod_base = OTHER; note = cytidine-3'-phosphate
  modified_base 7: mod_base = OTHER; note = adenosine-3'-phosphate
  modified_base 8: mod_base = OTHER; note = adenosine-3'-phosphate
  modified_base 9: mod_base = OTHER; note = guanosine-3'-phosphate
  modified_base 10: mod_base = OTHER; note = guanosine-3'-phosphate
  modified_base 11: mod_base = OTHER; note = cytidine-3'-phosphate
  modified_base 12: mod_base = OTHER; note = adenosine-3'-phosphate
  modified_base 13: mod_base = OTHER; note = adenosine-3'-phosphate
  modified_base 14: mod_base = OTHER; note = guanosine-3'-phosphate
  modified_base 15: mod_base = OTHER; note = cytidine-3'-phosphate
  modified_base 16: mod_base = OTHER; note = uridine-3'-phosphate
  modified_base 17: mod_base = OTHER; note = guanosine-3'-phosphate
  modified_base 18: mod_base = OTHER; note = cytidine-3'-phosphate
  modified_base 19: mod_base = OTHER; note = uridine-3'-phosphate
  misc_feature 1..19: note = RNA
  misc_feature 20..21: note = DNA
gacaccaaggcaagctgcttt

SEQ ID NO: 1375 - DNA, 21 bp, synthetic construct
  source 1..21: mol_type = other DNA
  modified_base 1: mod_base = OTHER; note = cytidine-3'-phosphate
  modified_base 2: mod_base = OTHER; note = adenosine-3'-phosphate
  modified_base 3: mod_base = OTHER; note = adenosine-3'-phosphate
  modified_base 4: mod_base = OTHER; note = guanosine-3'-phosphate
  modified_base 5: mod_base = OTHER; note = cytidine-3'-phosphate
  modified_base 6: mod_base = OTHER; note = uridine-3'-phosphate
  modified_base 7: mod_base = OTHER; note = guanosine-3'-phosphate
  modified_base 8: mod_base = OTHER; note = cytidine-3'-phosphate
  modified_base 9: mod_base = OTHER; note = uridine-3'-phosphate
  modified_base 10: mod_base = OTHER; note = adenosine-3'-phosphate
  modified_base 11: mod_base = OTHER; note = uridine-3'-phosphate
  modified_base 12: mod_base = OTHER; note = guanosine-3'-phosphate
  modified_base 13: mod_base = OTHER; note = adenosine-3'-phosphate
  modified_base 14: mod_base = OTHER; note = uridine-3'-phosphate
  modified_base 15: mod_base = OTHER; note = guanosine-3'-phosphate
  modified_base 16: mod_base = OTHER; note = guanosine-3'-phosphate
  modified_base 17: mod_base = OTHER; note = cytidine-3'-phosphate
  modified_base 18: mod_base = OTHER; note = cytidine-3'-phosphate
  modified_base 19: mod_base = OTHER; note = adenosine-3'-phosphate
  misc_feature 1..19: note = RNA
  misc_feature 20..21: note = DNA
caagctgctatgatggccatt

SEQ ID NO: 1376 - DNA, 21 bp, synthetic construct
  source 1..21: mol_type = other DNA
  modified_base 1: mod_base = OTHER; note = guanosine-3'-phosphate
  modified_base 2: mod_base = OTHER; note = adenosine-3'-phosphate
  modified_base 3: mod_base = OTHER; note = uridine-3'-phosphate
  modified_base 4: mod_base = OTHER; note = guanosine-3'-phosphate
  modified_base 5: mod_base = OTHER; note = guanosine-3'-phosphate
  modified_base 6: mod_base = OTHER; note = cytidine-3'-phosphate
  modified_base 7: mod_base = OTHER; note = cytidine-3'-phosphate
  modified_base 8: mod_base = OTHER; note = guanosine-3'-phosphate
  modified_base 9: mod_base = OTHER; note = cytidine-3'-phosphate
  modified_base 10: mod_base = OTHER; note = guanosine-3'-phosphate
  modified_base 11: mod_base = OTHER; note = guanosine-3'-phosphate
  modified_base 12: mod_base = OTHER; note = guanosine-3'-phosphate
  modified_base 13: mod_base = OTHER; note = cytidine-3'-phosphate
  modified_base 14: mod_base = OTHER; note = uridine-3'-phosphate
  modified_base 15: mod_base = OTHER; note = cytidine-3'-phosphate
  modified_base 16: mod_base = OTHER; note = adenosine-3'-phosphate
  modified_base 17: mod_base = OTHER; note = guanosine-3'-phosphate
  modified_base 18: mod_base = OTHER; note = cytidine-3'-phosphate
  modified_base 19: mod_base = OTHER; note = uridine-3'-phosphate
  misc_feature 1..19: note = RNA
  misc_feature 20..21: note = DNA
gatggccgcgggctcagcttt

SEQ ID NO: 1377 - DNA, 21 bp, synthetic construct
  source 1..21: mol_type = other DNA
  modified_base 1: mod_base = OTHER; note = uridine-3'-phosphate
  modified_base 2: mod_base = OTHER; note = cytidine-3'-phosphate
  modified_base 3: mod_base = OTHER; note = adenosine-3'-phosphate
  modified_base 4: mod_base = OTHER; note = guanosine-3'-phosphate
  modified_base 5: mod_base = OTHER; note = cytidine-3'-phosphate
  modified_base 6: mod_base = OTHER; note = uridine-3'-phosphate
  modified_base 7: mod_base = OTHER; note = adenosine-3'-phosphate
  modified_base 8: mod_base = OTHER; note = cytidine-3'-phosphate
  modified_base 9: mod_base = OTHER; note = cytidine-3'-phosphate
  modified_base 10: mod_base = OTHER; note = guanosine-3'-phosphate
  modified_base 11: mod_base = OTHER; note = cytidine-3'-phosphate
  modified_base 12: mod_base = OTHER; note = guanosine-3'-phosphate
  modified_base 13: mod_base = OTHER; note = guanosine-3'-phosphate
  modified_base 14: mod_base = OTHER; note = cytidine-3'-phosphate
  modified_base 15: mod_base = OTHER; note = cytidine-3'-phosphate
  modified_base 16: mod_base = OTHER; note = uridine-3'-phosphate
  modified_base 17: mod_base = OTHER; note = guanosine-3'-phosphate
  modified_base 18: mod_base = OTHER; note = guanosine-3'-phosphate
  modified_base 19: mod_base = OTHER; note = adenosine-3'-phosphate
  misc_feature 1..19: note = RNA
  misc_feature 20..21: note = DNA
tcagctaccgcggcctggatt

SEQ ID NO: 1378 - DNA, 21 bp, synthetic construct
  source 1..21: mol_type = other DNA
  modified_base 1: mod_base = OTHER; note = cytidine-3'-phosphate
  modified_base 2: mod_base = OTHER; note = guanosine-3'-phosphate
  modified_base 3: mod_base = OTHER; note = guanosine-3'-phosphate
  modified_base 4: mod_base = OTHER; note = cytidine-3'-phosphate
  modified_base 5: mod_base = OTHER; note = cytidine-3'-phosphate
  modified_base 6: mod_base = OTHER; note = uridine-3'-phosphate
  modified_base 7: mod_base = OTHER; note = guanosine-3'-phosphate
  modified_base 8: mod_base = OTHER; note = guanosine-3'-phosphate
  modified_base 9: mod_base = OTHER; note = cytidine-3'-phosphate
  modified_base 10: mod_base = OTHER; note = cytidine-3'-phosphate
  modified_base 11: mod_base = OTHER; note = adenosine-3'-phosphate
  modified_base 12: mod_base = OTHER; note = guanosine-3'-phosphate
  modified_base 13: mod_base = OTHER; note = guanosine-3'-phosphate
  modified_base 14: mod_base = OTHER; note = adenosine-3'-phosphate
  modified_base 15: mod_base = OTHER; note = cytidine-3'-phosphate
  modified_base 16: mod_base = OTHER; note = cytidine-3'-phosphate
  modified_base 17: mod_base = OTHER; note = adenosine-3'-phosphate
  modified_base 18: mod_base = OTHER; note = cytidine-3'-phosphate
  modified_base 19: mod_base = OTHER; note = adenosine-3'-phosphate
  misc_feature 1..19: note = RNA
  misc_feature 20..21: note = DNA
cggcctggccaggaccacatt

SEQ ID NO: 1379 - DNA, 21 bp, synthetic construct
  source 1..21: mol_type = other DNA
  modified_base 1: mod_base = OTHER; note = adenosine-3'-phosphate
  modified_base 2: mod_base = OTHER; note = guanosine-3'-phosphate
  modified_base 3: mod_base = OTHER; note = guanosine-3'-phosphate
  modified_base 4: mod_base = OTHER; note = adenosine-3'-phosphate
  modified_base 5: mod_base = OTHER; note = cytidine-3'-phosphate
  modified_base 6: mod_base = OTHER; note = cytidine-3'-phosphate
  modified_base 7: mod_base = OTHER; note = adenosine-3'-phosphate
  modified_base 8: mod_base = OTHER; note = cytidine-3'-phosphate
  modified_base 9: mod_base = OTHER; note = guanosine-3'-phosphate
  modified_base 10: mod_base = OTHER; note = cytidine-3'-phosphate
  modified_base 11: mod_base = OTHER; note = uridine-3'-phosphate
  modified_base 12: mod_base = OTHER; note = cytidine-3'-phosphate
  modified_base 13: mod_base = OTHER; note = uridine-3'-phosphate
  modified_base 14: mod_base = OTHER; note = cytidine-3'-phosphate
  modified_base 15: mod_base = OTHER; note = guanosine-3'-phosphate
  modified_base 16: mod_base = OTHER; note = guanosine-3'-phosphate
  modified_base 17: mod_base = OTHER; note = guanosine-3'-phosphate
  modified_base 18: mod_base = OTHER; note = uridine-3'-phosphate
  modified_base 19: mod_base = OTHER; note = adenosine-3'-phosphate
  misc_feature 1..19: note = RNA
  misc_feature 20..21: note = DNA
aggaccacgctctcgggtatt

SEQ ID NO: 1380 - DNA, 21 bp, synthetic construct
  source 1..21: mol_type = other DNA
  modified_base 1: mod_base = OTHER; note = uridine-3'-phosphate
  modified_base 2: mod_base = OTHER; note = cytidine-3'-phosphate
  modified_base 3: mod_base = OTHER; note = guanosine-3'-phosphate
  modified_base 4: mod_base = OTHER; note = guanosine-3'-phosphate
  modified_base 5: mod_base = OTHER; note = guanosine-3'-phosphate
  modified_base 6: mod_base = OTHER; note = uridine-3'-phosphate
  modified_base 7: mod_base = OTHER; note = guanosine-3'-phosphate
  modified_base 8: mod_base = OTHER; note = cytidine-3'-phosphate
  modified_base 9: mod_base = OTHER; note = guanosine-3'-phosphate
  modified_base 10: mod_base = OTHER; note = cytidine-3'-phosphate
  modified_base 11: mod_base = OTHER; note = cytidine-3'-phosphate
  modified_base 12: mod_base = OTHER; note = cytidine-3'-phosphate
  modified_base 13: mod_base = OTHER; note = uridine-3'-phosphate
  modified_base 14: mod_base = OTHER; note = guanosine-3'-phosphate
  modified_base 15: mod_base = OTHER; note = uridine-3'-phosphate
  modified_base 16: mod_base = OTHER; note = cytidine-3'-phosphate
  modified_base 17: mod_base = OTHER; note = adenosine-3'-phosphate
  modified_base 18: mod_base = OTHER; note = guanosine-3'-phosphate
  modified_base 19: mod_base = OTHER; note = adenosine-3'-phosphate
  misc_feature 1..19: note = RNA
  misc_feature 20..21: note = DNA
tcgggtgcgccctgtcagatt

SEQ ID NO: 1381 - DNA, 21 bp, synthetic construct
  source 1..21: mol_type = other DNA
  modified_base 1: mod_base = OTHER; note = cytidine-3'-phosphate
  modified_base 2: mod_base = OTHER; note = uridine-3'-phosphate
  modified_base 3: mod_base = OTHER; note = guanosine-3'-phosphate
  modified_base 4: mod_base = OTHER; note = uridine-3'-phosphate
  modified_base 5: mod_base = OTHER; note = cytidine-3'-phosphate
  modified_base 6: mod_base = OTHER; note = adenosine-3'-phosphate
  modified_base 7: mod_base = OTHER; note = guanosine-3'-phosphate
  modified_base 8: mod_base = OTHER; note = cytidine-3'-phosphate
  modified_base 9: mod_base = OTHER; note = cytidine-3'-phosphate
  modified_base 10: mod_base = OTHER; note = guanosine-3'-phosphate
  modified_base 11: mod_base = OTHER; note = uridine-3'-phosphate
  modified_base 12: mod_base = OTHER; note = guanosine-3'-phosphate
  modified_base 13: mod_base = OTHER; note = guanosine-3'-phosphate
  modified_base 14: mod_base = OTHER; note = guanosine-3'-phosphate
  modified_base 15: mod_base = OTHER; note = cytidine-3'-phosphate
  modified_base 16: mod_base = OTHER; note = cytidine-3'-phosphate
  modified_base 17: mod_base = OTHER; note = uridine-3'-phosphate
  modified_base 18: mod_base = OTHER; note = cytidine-3'-phosphate
  modified_base 19: mod_base = OTHER; note = adenosine-3'-phosphate
  misc_feature 1..19: note = RNA
  misc_feature 20..21: note = DNA
ctgtcagccgtgggcctcatt

SEQ ID NO: 1382 - DNA, 21 bp, synthetic construct
  source 1..21: mol_type = other DNA
  modified_base 1: mod_base = OTHER; note = uridine-3'-phosphate
  modified_base 2: mod_base = OTHER; note = guanosine-3'-phosphate
  modified_base 3: mod_base = OTHER; note = guanosine-3'-phosphate
  modified_base 4: mod_base = OTHER; note = guanosine-3'-phosphate
  modified_base 5: mod_base = OTHER; note = cytidine-3'-phosphate
  modified_base 6: mod_base = OTHER; note = cytidine-3'-phosphate
  modified_base 7: mod_base = OTHER; note = uridine-3'-phosphate
  modified_base 8: mod_base = OTHER; note = cytidine-3'-phosphate
  modified_base 9: mod_base = OTHER; note = guanosine-3'-phosphate
  modified_base 10: mod_base = OTHER; note = guanosine-3'-phosphate
  modified_base 11: mod_base = OTHER; note = adenosine-3'-phosphate
  modified_base 12: mod_base = OTHER; note = guanosine-3'-phosphate
  modified_base 13: mod_base = OTHER; note = guanosine-3'-phosphate
  modified_base 14: mod_base = OTHER; note = cytidine-3'-phosphate
  modified_base 15: mod_base = OTHER; note = cytidine-3'-phosphate
  modified_base 16: mod_base = OTHER; note = adenosine-3'-phosphate
  modified_base 17: mod_base = OTHER; note = cytidine-3'-phosphate
  modified_base 18: mod_base = OTHER; note = cytidine-3'-phosphate
  modified_base 19: mod_base = OTHER; note = uridine-3'-phosphate
  misc_feature 1..19: note = RNA
  misc_feature 20..21: note = DNA
tgggcctcggaggccaccttt

SEQ ID NO: 1383 - DNA, 21 bp, synthetic construct
  source 1..21: mol_type = other DNA
  modified_base 1: mod_base = OTHER; note = cytidine-3'-phosphate
  modified_base 2: mod_base = OTHER; note = cytidine-3'-phosphate
  modified_base 3: mod_base = OTHER; note = adenosine-3'-phosphate
  modified_base 4: mod_base = OTHER; note = cytidine-3'-phosphate
  modified_base 5: mod_base = OTHER; note = cytidine-3'-phosphate
  modified_base 6: mod_base = OTHER; note = uridine-3'-phosphate
  modified_base 7: mod_base = OTHER; note = adenosine-3'-phosphate
  modified_base 8: mod_base = OTHER; note = cytidine-3'-phosphate
  modified_base 9: mod_base = OTHER; note = cytidine-3'-phosphate
  modified_base 10: mod_base = OTHER; note = guanosine-3'-phosphate
  modified_base 11: mod_base = OTHER; note = guanosine-3'-phosphate
  modified_base 12: mod_base = OTHER; note = adenosine-3'-phosphate
  modified_base 13: mod_base = OTHER; note = adenosine-3'-phosphate
  modified_base 14: mod_base = OTHER; note = cytidine-3'-phosphate
  modified_base 15: mod_base = OTHER; note = guanosine-3'-phosphate
  modified_base 16: mod_base = OTHER; note = uridine-3'-phosphate
  modified_base 17: mod_base = OTHER; note = guanosine-3'-phosphate
  modified_base 18: mod_base = OTHER; note = adenosine-3'-phosphate
  modified_base 19: mod_base = OTHER; note = adenosine-3'-phosphate
  misc_feature 1..19: note = RNA
  misc_feature 20..21: note = DNA
ccacctaccggaacgtgaatt

SEQ ID NO: 1384 - DNA, 21 bp, synthetic construct
  source 1..21: mol_type = other DNA
  modified_base 1: mod_base = OTHER; note = adenosine-3'-phosphate
  modified_base 2: mod_base = OTHER; note = adenosine-3'-phosphate
  modified_base 3: mod_base = OTHER; note = cytidine-3'-phosphate
  modified_base 4: mod_base = OTHER; note = guanosine-3'-phosphate
  modified_base 5: mod_base = OTHER; note = uridine-3'-phosphate
  modified_base 6: mod_base = OTHER; note = guanosine-3'-phosphate
  modified_base 7: mod_base = OTHER; note = adenosine-3'-phosphate
  modified_base 8: mod_base = OTHER; note = cytidine-3'-phosphate
  modified_base 9: mod_base = OTHER; note = uridine-3'-phosphate
  modified_base 10: mod_base = OTHER; note = guanosine-3'-phosphate
  modified_base 11: mod_base = OTHER; note = cytidine-3'-phosphate
  modified_base 12: mod_base = OTHER; note = cytidine-3'-phosphate
  modified_base 13: mod_base = OTHER; note = guanosine-3'-phosphate
  modified_base 14: mod_base = OTHER; note = adenosine-3'-phosphate
  modified_base 15: mod_base = OTHER; note = guanosine-3'-phosphate
  modified_base 16: mod_base = OTHER; note = cytidine-3'-phosphate
  modified_base 17: mod_base = OTHER; note = adenosine-3'-phosphate
  modified_base 18: mod_base = OTHER; note = adenosine-3'-phosphate
  modified_base 19: mod_base = OTHER; note = adenosine-3'-phosphate
  misc_feature 1..19: note = RNA
  misc_feature 20..21: note = DNA
aacgtgactgccgagcaaatt

SEQ ID NO: 1385 - DNA, 21 bp, synthetic construct
  source 1..21: mol_type = other DNA
  modified_base 1: mod_base = OTHER; note = cytidine-3'-phosphate
  modified_base 2: mod_base = OTHER; note = guanosine-3'-phosphate
  modified_base 3: mod_base = OTHER; note = adenosine-3'-phosphate
  modified_base 4: mod_base = OTHER; note = guanosine-3'-phosphate
  modified_base 5: mod_base = OTHER; note = cytidine-3'-phosphate
  modified_base 6: mod_base = OTHER; note = adenosine-3'-phosphate
  modified_base 7: mod_base = OTHER; note = adenosine-3'-phosphate
  modified_base 8: mod_base = OTHER; note = guanosine-3'-phosphate
  modified_base 9: mod_base = OTHER; note = cytidine-3'-phosphate
  modified_base 10: mod_base = OTHER; note = guanosine-3'-phosphate
  modified_base 11: mod_base = OTHER; note = cytidine-3'-phosphate
  modified_base 12: mod_base = OTHER; note = guanosine-3'-phosphate
  modified_base 13: mod_base = OTHER; note = guanosine-3'-phosphate
  modified_base 14: mod_base = OTHER; note = adenosine-3'-phosphate
  modified_base 15: mod_base = OTHER; note = adenosine-3'-phosphate
  modified_base 16: mod_base = OTHER; note = cytidine-3'-phosphate
  modified_base 17: mod_base = OTHER; note = uridine-3'-phosphate
  modified_base 18: mod_base = OTHER; note = guanosine-3'-phosphate
  modified_base 19: mod_base = OTHER; note = adenosine-3'-phosphate
  misc_feature 1..19: note = RNA
  misc_feature 20..21: note = DNA
cgagcaagcgcggaactgatt

SEQ ID NO: 1386 - DNA, 21 bp, synthetic construct
  source 1..21: mol_type = other DNA
  modified_base 1: mod_base = OTHER; note = cytidine-3'-phosphate
  modified_base 2: mod_base = OTHER; note = guanosine-3'-phosphate
  modified_base 3: mod_base = OTHER; note = guanosine-3'-phosphate
  modified_base 4: mod_base = OTHER; note = adenosine-3'-phosphate
  modified_base 5: mod_base = OTHER; note = adenosine-3'-phosphate
  modified_base 6: mod_base = OTHER; note = cytidine-3'-phosphate
  modified_base 7: mod_base = OTHER; note = uridine-3'-phosphate
  modified_base 8: mod_base = OTHER; note = guanosine-3'-phosphate
  modified_base 9: mod_base = OTHER; note = guanosine-3'-phosphate
  modified_base 10: mod_base = OTHER; note = guanosine-3'-phosphate
  modified_base 11: mod_base = OTHER; note = guanosine-3'-phosphate
  modified_base 12: mod_base = OTHER; note = adenosine-3'-phosphate
  modified_base 13: mod_base = OTHER; note = cytidine-3'-phosphate
  modified_base 14: mod_base = OTHER; note = uridine-3'-phosphate
  modified_base 15: mod_base = OTHER; note = guanosine-3'-phosphate
  modified_base 16: mod_base = OTHER; note = guanosine-3'-phosphate
  modified_base 17: mod_base = OTHER; note = guanosine-3'-phosphate
  modified_base 18: mod_base = OTHER; note = cytidine-3'-phosphate
  modified_base 19: mod_base = OTHER; note = adenosine-3'-phosphate
  misc_feature 1..19: note = RNA
  misc_feature 20..21: note = DNA
cggaactggggactgggcatt

SEQ ID NO: 1387 - DNA, 21 bp, synthetic construct
  source 1..21: mol_type = other DNA
  modified_base 1: mod_base = OTHER; note = guanosine-3'-phosphate
  modified_base 2: mod_base = OTHER; note = adenosine-3'-phosphate
  modified_base 3: mod_base = OTHER; note = cytidine-3'-phosphate
  modified_base 4: mod_base = OTHER; note = uridine-3'-phosphate
  modified_base 5: mod_base = OTHER; note = guanosine-3'-phosphate
  modified_base 6: mod_base = OTHER; note = guanosine-3'-phosphate
  modified_base 7: mod_base = OTHER; note = guanosine-3'-phosphate
  modified_base 8: mod_base = OTHER; note = cytidine-3'-phosphate
  modified_base 9: mod_base = OTHER; note = guanosine-3'-phosphate
  modified_base 10: mod_base = OTHER; note = guanosine-3'-phosphate
  modified_base 11: mod_base = OTHER; note = cytidine-3'-phosphate
  modified_base 12: mod_base = OTHER; note = cytidine-3'-phosphate
  modified_base 13: mod_base = OTHER; note = adenosine-3'-phosphate
  modified_base 14: mod_base = OTHER; note = cytidine-3'-phosphate
  modified_base 15: mod_base = OTHER; note = guanosine-3'-phosphate
  modified_base 16: mod_base = OTHER; note = cytidine-3'-phosphate
  modified_base 17: mod_base = OTHER; note = cytidine-3'-phosphate
  modified_base 18: mod_base = OTHER; note = uridine-3'-phosphate
  modified_base 19: mod_base = OTHER; note = uridine-3'-phosphate
  misc_feature 1..19: note = RNA
  misc_feature 20..21: note = DNA
gactgggcggccacgcctttt

SEQ ID NO: 1388 - DNA, 21 bp, synthetic construct
  source 1..21: mol_type = other DNA
  modified_base 1: mod_base = OTHER; note = adenosine-3'-phosphate
  modified_base 2: mod_base = OTHER; note = cytidine-3'-phosphate
  modified_base 3: mod_base = OTHER; note = guanosine-3'-phosphate
  modified_base 4: mod_base = OTHER; note = cytidine-3'-phosphate
  modified_base 5: mod_base = OTHER; note = cytidine-3'-phosphate
  modified_base 6: mod_base = OTHER; note = uridine-3'-phosphate
  modified_base 7: mod_base = OTHER; note = uridine-3'-phosphate
  modified_base 8: mod_base = OTHER; note = cytidine-3'-phosphate
  modified_base 9: mod_base = OTHER; note = uridine-3'-phosphate
  modified_base 10: mod_base = OTHER; note = guanosine-3'-phosphate
  modified_base 11: mod_base = OTHER; note = cytidine-3'-phosphate
  modified_base 12: mod_base = OTHER; note = cytidine-3'-phosphate
  modified_base 13: mod_base = OTHER; note = guanosine-3'-phosphate
  modified_base 14: mod_base = OTHER; note = guanosine-3'-phosphate
  modified_base 15: mod_base = OTHER; note = adenosine-3'-phosphate
  modified_base 16: mod_base = OTHER; note = adenosine-3'-phosphate
  modified_base 17: mod_base = OTHER; note = cytidine-3'-phosphate
  modified_base 18: mod_base = OTHER; note = cytidine-3'-phosphate
  modified_base 19: mod_base = OTHER; note = adenosine-3'-phosphate
  misc_feature 1..19: note = RNA
  misc_feature 20..21: note = DNA
acgccttctgccggaaccatt

SEQ ID NO: 1389 - DNA, 21 bp, synthetic construct
  source 1..21: mol_type = other DNA
  modified_base 1: mod_base = OTHER; note = cytidine-3'-phosphate
  modified_base 2: mod_base = OTHER; note = guanosine-3'-phosphate
  modified_base 3: mod_base = OTHER; note = guanosine-3'-phosphate
  modified_base 4: mod_base = OTHER; note = adenosine-3'-phosphate
  modified_base 5: mod_base = OTHER; note = adenosine-3'-phosphate
  modified_base 6: mod_base = OTHER; note = cytidine-3'-phosphate
  modified_base 7: mod_base = OTHER; note = cytidine-3'-phosphate
  modified_base 8: mod_base = OTHER; note = cytidine-3'-phosphate
  modified_base 9: mod_base = OTHER; note = guanosine-3'-phosphate
  modified_base 10: mod_base = OTHER; note = guanosine-3'-phosphate
  modified_base 11: mod_base = OTHER; note = adenosine-3'-phosphate
  modified_base 12: mod_base = OTHER; note = cytidine-3'-phosphate
  modified_base 13: mod_base = OTHER; note = adenosine-3'-phosphate
  modified_base 14: mod_base = OTHER; note = adenosine-3'-phosphate
  modified_base 15: mod_base = OTHER; note = cytidine-3'-phosphate
  modified_base 16: mod_base = OTHER; note = guanosine-3'-phosphate
  modified_base 17: mod_base = OTHER; note = adenosine-3'-phosphate
  modified_base 18: mod_base = OTHER; note = cytidine-3'-phosphate
  modified_base 19: mod_base = OTHER; note = adenosine-3'-phosphate
  misc_feature 1..19: note = RNA
  misc_feature 20..21: note = DNA
cggaacccggacaacgacatt

SEQ ID NO: 1390 - DNA, 21 bp, synthetic construct
  source 1..21: mol_type = other DNA
  modified_base 1: mod_base = OTHER; note = adenosine-3'-phosphate
  modified_base 2: mod_base = OTHER; note = adenosine-3'-phosphate
  modified_base 3: mod_base = OTHER; note = cytidine-3'-phosphate
  modified_base 4: mod_base = OTHER; note = guanosine-3'-phosphate
  modified_base 5: mod_base = OTHER; note = adenosine-3'-phosphate
  modified_base 6: mod_base = OTHER; note = cytidine-3'-phosphate
  modified_base 7: mod_base = OTHER; note = adenosine-3'-phosphate
  modified_base 8: mod_base = OTHER; note = uridine-3'-phosphate
  modified_base 9: mod_base = OTHER; note = cytidine-3'-phosphate
  modified_base 10: mod_base = OTHER; note = cytidine-3'-phosphate
  modified_base 11: mod_base = OTHER; note = guanosine-3'-phosphate
  modified_base 12: mod_base = OTHER; note = cytidine-3'-phosphate
  modified_base 13: mod_base = OTHER; note = cytidine-3'-phosphate
  modified_base 14: mod_base = OTHER; note = cytidine-3'-phosphate
  modified_base 15: mod_base = OTHER; note = guanosine-3'-phosphate
  modified_base 16: mod_base = OTHER; note = uridine-3'-phosphate
  modified_base 17: mod_base = OTHER; note = guanosine-3'-phosphate
  modified_base 18: mod_base = OTHER; note = guanosine-3'-phosphate
  modified_base 19: mod_base = OTHER; note = uridine-3'-phosphate
  misc_feature 1..19: note = RNA
  misc_feature 20..21: note = DNA
aacgacatccgcccgtggttt

SEQ ID NO: 1391 - DNA, 21 bp, synthetic construct
  source 1..21: mol_type = other DNA
  modified_base 1: mod_base = OTHER; note = guanosine-3'-phosphate
  modified_base 2: mod_base = OTHER; note = cytidine-3'-phosphate
  modified_base 3: mod_base = OTHER; note = cytidine-3'-phosphate
  modified_base 4: mod_base = OTHER; note = cytidine-3'-phosphate
  modified_base 5: mod_base = OTHER; note = guanosine-3'-phosphate
  modified_base 6: mod_base = OTHER; note = uridine-3'-phosphate
  modified_base 7: mod_base = OTHER; note = guanosine-3'-phosphate
  modified_base 8: mod_base = OTHER; note = guanosine-3'-phosphate
  modified_base 9: mod_base = OTHER; note = uridine-3'-phosphate
  modified_base 10: mod_base = OTHER; note = guanosine-3'-phosphate
  modified_base 11: mod_base = OTHER; note = cytidine-3'-phosphate
  modified_base 12: mod_base = OTHER; note = uridine-3'-phosphate
  modified_base 13: mod_base = OTHER; note = uridine-3'-phosphate
  modified_base 14: mod_base = OTHER; note = cytidine-3'-phosphate
  modified_base 15: mod_base = OTHER; note = guanosine-3'-phosphate
  modified_base 16: mod_base = OTHER; note = uridine-3'-phosphate
  modified_base 17: mod_base = OTHER; note = guanosine-3'-phosphate
  modified_base 18: mod_base = OTHER; note = cytidine-3'-phosphate
  modified_base 19: mod_base = OTHER; note = uridine-3'-phosphate
  misc_feature 1..19: note = RNA
  misc_feature 20..21: note = DNA
gcccgtggtgcttcgtgcttt

SEQ ID NO: 1392 - DNA, 21 bp, synthetic construct
  source 1..21: mol_type = other DNA
  modified_base 1: mod_base = OTHER; note = uridine-3'-phosphate
  modified_base 2: mod_base = OTHER; note = uridine-3'-phosphate
  modified_base 3: mod_base = OTHER; note = cytidine-3'-phosphate
  modified_base 4: mod_base = OTHER; note = guanosine-3'-phosphate
  modified_base 5: mod_base = OTHER; note = uridine-3'-phosphate
  modified_base 6: mod_base = OTHER; note = guanosine-3'-phosphate
  modified_base 7: mod_base = OTHER; note = cytidine-3'-phosphate
  modified_base 8: mod_base = OTHER; note = uridine-3'-phosphate
  modified_base 9: mod_base = OTHER; note = guanosine-3'-phosphate
  modified_base 10: mod_base = OTHER; note = adenosine-3'-phosphate
  modified_base 11: mod_base = OTHER; note = adenosine-3'-phosphate
  modified_base 12: mod_base = OTHER; note = cytidine-3'-phosphate
  modified_base 13: mod_base = OTHER; note = cytidine-3'-phosphate
  modified_base 14: mod_base = OTHER; note = guanosine-3'-phosphate
  modified_base 15: mod_base = OTHER; note = cytidine-3'-phosphate
  modified_base 16: mod_base = OTHER; note = guanosine-3'-phosphate
  modified_base 17: mod_base = OTHER; note = adenosine-3'-phosphate
  modified_base 18: mod_base = OTHER; note = cytidine-3'-phosphate
  modified_base 19: mod_base = OTHER; note = adenosine-3'-phosphate
  misc_feature 1..19: note = RNA
  misc_feature 20..21: note = DNA
ttcgtgctgaaccgcgacatt

SEQ ID NO: 1393 - DNA, 21 bp, synthetic construct
  source 1..21: mol_type = other DNA
  modified_base 1: mod_base = OTHER; note = adenosine-3'-phosphate
  modified_base 2: mod_base = OTHER; note = cytidine-3'-phosphate
  modified_base 3: mod_base = OTHER; note = cytidine-3'-phosphate
  modified_base 4: mod_base = OTHER; note = guanosine-3'-phosphate
  modified_base 5: mod_base = OTHER; note = cytidine-3'-phosphate
  modified_base 6: mod_base = OTHER; note = guanosine-3'-phosphate
  modified_base 7: mod_base = OTHER; note = adenosine-3'-phosphate
  modified_base 8: mod_base = OTHER; note = cytidine-3'-phosphate
  modified_base 9: mod_base = OTHER; note = cytidine-3'-phosphate
  modified_base 10: mod_base = OTHER; note = guanosine-3'-phosphate
  modified_base 11: mod_base = OTHER; note = guanosine-3'-phosphate
  modified_base 12: mod_base = OTHER; note = cytidine-3'-phosphate
  modified_base 13: mod_base = OTHER; note = uridine-3'-phosphate
  modified_base 14: mod_base = OTHER; note = guanosine-3'-phosphate
  modified_base 15: mod_base = OTHER; note = adenosine-3'-phosphate
  modified_base 16: mod_base = OTHER; note = guanosine-3'-phosphate
  modified_base 17: mod_base = OTHER; note = cytidine-3'-phosphate
  modified_base 18: mod_base = OTHER; note = uridine-3'-phosphate
  modified_base 19: mod_base = OTHER; note = adenosine-3'-phosphate
  misc_feature 1..19: note = RNA
  misc_feature 20..21: note = DNA
accgcgaccggctgagctatt

SEQ ID NO: 1394 - DNA, 21 bp, synthetic construct
  source 1..21: mol_type = other DNA
  modified_base 1: mod_base = OTHER; note = cytidine-3'-phosphate
  modified_base 2: mod_base = OTHER; note = uridine-3'-phosphate
  modified_base 3: mod_base = OTHER; note = guanosine-3'-phosphate
  modified_base 4: mod_base = OTHER; note = adenosine-3'-phosphate
  modified_base 5: mod_base = OTHER; note = guanosine-3'-phosphate
  modified_base 6: mod_base = OTHER; note = cytidine-3'-phosphate
  modified_base 7: mod_base = OTHER; note = uridine-3'-phosphate
  modified_base 8: mod_base = OTHER; note = guanosine-3'-phosphate
  modified_base 9: mod_base = OTHER; note = guanosine-3'-phosphate
  modified_base 10: mod_base = OTHER; note = guanosine-3'-phosphate
  modified_base 11: mod_base = OTHER; note = adenosine-3'-phosphate
  modified_base 12: mod_base = OTHER; note = guanosine-3'-phosphate
  modified_base 13: mod_base = OTHER; note = uridine-3'-phosphate
  modified_base 14: mod_base = OTHER; note = adenosine-3'-phosphate
  modified_base 15: mod_base = OTHER; note = cytidine-3'-phosphate
  modified_base 16: mod_base = OTHER; note = uridine-3'-phosphate
  modified_base 17: mod_base = OTHER; note = guanosine-3'-phosphate
  modified_base 18: mod_base = OTHER; note = cytidine-3'-phosphate
  modified_base 19: mod_base = OTHER; note = adenosine-3'-phosphate
  misc_feature 1..19: note = RNA
  misc_feature 20..21: note = DNA
ctgagctgggagtactgcatt

SEQ ID NO: 1395 - DNA, 21 bp, synthetic construct
  source 1..21: mol_type = other DNA
  modified_base 1: mod_base = OTHER; note = uridine-3'-phosphate
  modified_base 2: mod_base = OTHER; note = adenosine-3'-phosphate
  modified_base 3: mod_base = OTHER; note = cytidine-3'-phosphate
  modified_base 4: mod_base = OTHER; note = uridine-3'-phosphate
  modified_base 5: mod_base = OTHER; note = guanosine-3'-phosphate
  modified_base 6: mod_base = OTHER; note = cytidine-3'-phosphate
  modified_base 7: mod_base = OTHER; note = guanosine-3'-phosphate
  modified_base 8: mod_base = OTHER; note = adenosine-3'-phosphate
  modified_base 9: mod_base = OTHER; note = cytidine-3'-phosphate
  modified_base 10: mod_base = OTHER; note = cytidine-3'-phosphate
  modified_base 11: mod_base = OTHER; note = uridine-3'-phosphate
  modified_base 12: mod_base = OTHER; note = guanosine-3'-phosphate
  modified_base 13: mod_base = OTHER; note = guanosine-3'-phosphate
  modified_base 14: mod_base = OTHER; note = cytidine-3'-phosphate
  modified_base 15: mod_base = OTHER; note = adenosine-3'-phosphate
  modified_base 16: mod_base = OTHER; note = cytidine-3'-phosphate
  modified_base 17: mod_base = OTHER; note = adenosine-3'-phosphate
  modified_base 18: mod_base = OTHER; note = guanosine-3'-phosphate
  modified_base 19: mod_base = OTHER; note = uridine-3'-phosphate
  misc_feature 1..19: note = RNA
  misc_feature 20..21: note = DNA
tactgcgacctggcacagttt

SEQ ID NO: 1396 - DNA, 21 bp, synthetic construct
  source 1..21: mol_type = other DNA
  modified_base 1: mod_base = OTHER; note = uridine-3'-phosphate
  modified_base 2: mod_base = OTHER; note = guanosine-3'-phosphate
  modified_base 3: mod_base = OTHER; note = guanosine-3'-phosphate
  modified_base 4: mod_base = OTHER; note = cytidine-3'-phosphate
  modified_base 5: mod_base = OTHER; note = adenosine-3'-phosphate
  modified_base 6: mod_base = OTHER; note = cytidine-3'-phosphate
  modified_base 7: mod_base = OTHER; note = adenosine-3'-phosphate
  modified_base 8: mod_base = OTHER; note = guanosine-3'-phosphate
  modified_base 9: mod_base = OTHER; note = uridine-3'-phosphate
  modified_base 10: mod_base = OTHER; note = guanosine-3'-phosphate
  modified_base 11: mod_base = OTHER; note = cytidine-3'-phosphate
  modified_base 12: mod_base = OTHER; note = cytidine-3'-phosphate
  modified_base 13: mod_base = OTHER; note = adenosine-3'-phosphate
  modified_base 14: mod_base = OTHER; note = guanosine-3'-phosphate
  modified_base 15: mod_base = OTHER; note = adenosine-3'-phosphate
  modified_base 16: mod_base = OTHER; note = cytidine-3'-phosphate
  modified_base 17: mod_base = OTHER; note = cytidine-3'-phosphate
  modified_base 18: mod_base = OTHER; note = cytidine-3'-phosphate
  modified_base 19: mod_base = OTHER; note = adenosine-3'-phosphate
  misc_feature 1..19: note = RNA
  misc_feature 20..21: note = DNA
tggcacagtgccagacccatt

SEQ ID NO: 1397 - DNA, 21 bp, synthetic construct
  source 1..21: mol_type = other DNA
  modified_base 1: mod_base = OTHER; note = adenosine-3'-phosphate
  modified_base 2: mod_base = OTHER; note = guanosine-3'-phosphate
  modified_base 3: mod_base = OTHER; note = adenosine-3'-phosphate
  modified_base 4: mod_base = OTHER; note = cytidine-3'-phosphate
  modified_base 5: mod_base = OTHER; note = cytidine-3'-phosphate
  modified_base 6: mod_base = OTHER; note = cytidine-3'-phosphate
  modified_base 7: mod_base = OTHER; note = cytidine-3'-phosphate
  modified_base 8: mod_base = OTHER; note = adenosine-3'-phosphate
  modified_base 9: mod_base = OTHER; note = adenosine-3'-phosphate
  modified_base 10: mod_base = OTHER; note = cytidine-3'-phosphate
  modified_base 11: mod_base = OTHER; note = cytidine-3'-phosphate
  modified_base 12: mod_base = OTHER; note = cytidine-3'-phosphate
  modified_base 13: mod_base = OTHER; note = adenosine-3'-phosphate
  modified_base 14: mod_base = OTHER; note = guanosine-3'-phosphate
  modified_base 15: mod_base = OTHER; note = guanosine-3'-phosphate
  modified_base 16: mod_base = OTHER; note = cytidine-3'-phosphate
  modified_base 17: mod_base = OTHER; note = guanosine-3'-phosphate
  modified_base 18: mod_base = OTHER; note = guanosine-3'-phosphate
  modified_base 19: mod_base = OTHER; note = adenosine-3'-phosphate
  misc_feature 1..19: note = RNA
  misc_feature 20..21: note = DNA
agaccccaacccaggcggatt

SEQ ID NO: 1398 - DNA, 21 bp, synthetic construct
  source 1..21: mol_type = other DNA
  modified_base 1: mod_base = OTHER; note = adenosine-3'-phosphate
  modified_base 2: mod_base = OTHER; note = guanosine-3'-phosphate
  modified_base 3: mod_base = OTHER; note = guanosine-3'-phosphate
  modified_base 4: mod_base = OTHER; note = cytidine-3'-phosphate
  modified_base 5: mod_base = OTHER; note = guanosine-3'-phosphate
  modified_base 6: mod_base = OTHER; note = guanosine-3'-phosphate
  modified_base 7: mod_base = OTHER; note = cytidine-3'-phosphate
  modified_base 8: mod_base = OTHER; note = guanosine-3'-phosphate
  modified_base 9: mod_base = OTHER; note = cytidine-3'-phosphate
  modified_base 10: mod_base = OTHER; note = cytidine-3'-phosphate
  modified_base 11: mod_base = OTHER; note = uridine-3'-phosphate
  modified_base 12: mod_base = OTHER; note = cytidine-3'-phosphate
  modified_base 13: mod_base = OTHER; note = cytidine-3'-phosphate
  modified_base 14: mod_base = OTHER; note = guanosine-3'-phosphate
  modified_base 15: mod_base = OTHER; note = adenosine-3'-phosphate
  modified_base 16: mod_base = OTHER; note = cytidine-3'-phosphate
  modified_base 17: mod_base = OTHER; note = cytidine-3'-phosphate
  modified_base 18: mod_base = OTHER; note = cytidine-3'-phosphate
  modified_base 19: mod_base = OTHER; note = adenosine-3'-phosphate
  misc_feature 1..19: note = RNA
  misc_feature 20..21: note = DNA
aggcggcgcctccgacccatt

SEQ ID NO: 1399 - DNA, 21 bp, synthetic construct
  source 1..21: mol_type = other DNA
  modified_base 1: mod_base = OTHER; note = uridine-3'-phosphate
  modified_base 2: mod_base = OTHER; note = cytidine-3'-phosphate
  modified_base 3: mod_base = OTHER; note = cytidine-3'-phosphate
  modified_base 4: mod_base = OTHER; note = guanosine-3'-phosphate
  modified_base 5: mod_base = OTHER; note = adenosine-3'-phosphate
  modified_base 6: mod_base = OTHER; note = cytidine-3'-phosphate
  modified_base 7: mod_base = OTHER; note = cytidine-3'-phosphate
  modified_base 8: mod_base = OTHER; note = cytidine-3'-phosphate
  modified_base 9: mod_base = OTHER; note = cytidine-3'-phosphate
  modified_base 10: mod_base = OTHER; note = guanosine-3'-phosphate
  modified_base 11: mod_base = OTHER; note = guanosine-3'-phosphate
  modified_base 12: mod_base = OTHER; note = uridine-3'-phosphate
  modified_base 13: mod_base = OTHER; note = guanosine-3'-phosphate
  modified_base 14: mod_base = OTHER; note = uridine-3'-phosphate
  modified_base 15: mod_base = OTHER; note = cytidine-3'-phosphate
  modified_base 16: mod_base = OTHER; note = cytidine-3'-phosphate
  modified_base 17: mod_base = OTHER; note = cytidine-3'-phosphate
  modified_base 18: mod_base = OTHER; note = cytidine-3'-phosphate
  modified_base 19: mod_base = OTHER; note = uridine-3'-phosphate
  misc_feature 1..19: note = RNA
  misc_feature 20..21: note = DNA
tccgaccccggtgtccccttt

SEQ ID NO: 1400 - DNA, 21 bp, synthetic construct
  source 1..21: mol_type = other DNA
  modified_base 1: mod_base = OTHER; note = uridine-3'-phosphate
  modified_base 2: mod_base = OTHER; note = guanosine-3'-phosphate
  modified_base 3: mod_base = OTHER; note = uridine-3'-phosphate
  modified_base 4: mod_base = OTHER; note = cytidine-3'-phosphate
  modified_base 5: mod_base = OTHER; note = cytidine-3'-phosphate
  modified_base 6: mod_base = OTHER; note = cytidine-3'-phosphate
  modified_base 7: mod_base = OTHER; note = cytidine-3'-phosphate
  modified_base 8: mod_base = OTHER; note = uridine-3'-phosphate
  modified_base 9: mod_base = OTHER; note = adenosine-3'-phosphate
  modified_base 10: mod_base = OTHER; note = guanosine-3'-phosphate
  modified_base 11: mod_base = OTHER; note = guanosine-3'-phosphate
  modified_base 12: mod_base = OTHER; note = cytidine-3'-phosphate
  modified_base 13: mod_base = OTHER; note = uridine-3'-phosphate
  modified_base 14: mod_base = OTHER; note = uridine-3'-phosphate
  modified_base 15: mod_base = OTHER; note = cytidine-3'-phosphate
  modified_base 16: mod_base = OTHER; note = adenosine-3'-phosphate
  modified_base 17: mod_base = OTHER; note = uridine-3'-phosphate
  modified_base 18: mod_base = OTHER; note = guanosine-3'-phosphate
  modified_base 19: mod_base = OTHER; note = uridine-3'-phosphate
  misc_feature 1..19: note = RNA
  misc_feature 20..21: note = DNA
tgtcccctaggcttcatgttt

SEQ ID NO: 1401 - DNA, 21 bp, synthetic construct
  source 1..21: mol_type = other DNA
  modified_base 1: mod_base = OTHER; note = uridine-3'-phosphate
  modified_base 2: mod_base = OTHER; note = uridine-3'-phosphate
  modified_base 3: mod_base = OTHER; note = cytidine-3'-phosphate
  modified_base 4: mod_base = OTHER; note = adenosine-3'-phosphate
  modified_base 5: mod_base = OTHER; note = uridine-3'-phosphate
  modified_base 6: mod_base = OTHER; note = guanosine-3'-phosphate
  modified_base 7: mod_base = OTHER; note = uridine-3'-phosphate
  modified_base 8: mod_base = OTHER; note = cytidine-3'-phosphate
  modified_base 9: mod_base = OTHER; note = cytidine-3'-phosphate
  modified_base 10: mod_base = OTHER; note = cytidine-3'-phosphate
  modified_base 11: mod_base = OTHER; note = adenosine-3'-phosphate
  modified_base 12: mod_base = OTHER; note = cytidine-3'-phosphate
  modified_base 13: mod_base = OTHER; note = uridine-3'-phosphate
  modified_base 14: mod_base = OTHER; note = cytidine-3'-phosphate
  modified_base 15: mod_base = OTHER; note = adenosine-3'-phosphate
  modified_base 16: mod_base = OTHER; note = uridine-3'-phosphate
  modified_base 17: mod_base = OTHER; note = guanosine-3'-phosphate
  modified_base 18: mod_base = OTHER; note = cytidine-3'-phosphate
  modified_base 19: mod_base = OTHER; note = adenosine-3'-phosphate
  misc_feature 1..19: note = RNA
  misc_feature 20..21: note = DNA
ttcatgtcccactcatgcatt

SEQ ID NO: 1402 - DNA, 21 bp, synthetic construct
  source 1..21: mol_type = other DNA
  modified_base 1: mod_base = OTHER; note = adenosine-3'-phosphate
  modified_base 2: mod_base = OTHER; note = cytidine-3'-phosphate
  modified_base 3: mod_base = OTHER; note = uridine-3'-phosphate
  modified_base 4: mod_base = OTHER; note = cytidine-3'-phosphate
  modified_base 5: mod_base = OTHER; note = adenosine-3'-phosphate
  modified_base 6: mod_base = OTHER; note = uridine-3'-phosphate
  modified_base 7: mod_base = OTHER; note = guanosine-3'-phosphate
  modified_base 8: mod_base = OTHER; note = cytidine-3'-phosphate
  modified_base 9: mod_base = OTHER; note = cytidine-3'-phosphate
  modified_base 10: mod_base = OTHER; note = cytidine-3'-phosphate
  modified_base 11: mod_base = OTHER; note = guanosine-3'-phosphate
  modified_base 12: mod_base = OTHER; note = cytidine-3'-phosphate
  modified_base 13: mod_base = OTHER; note = guanosine-3'-phosphate
  modified_base 14: mod_base = OTHER; note = cytidine-3'-phosphate
  modified_base 15: mod_base = OTHER; note = adenosine-3'-phosphate
  modified_base 16: mod_base = OTHER; note = guanosine-3'-phosphate
  modified_base 17: mod_base = OTHER; note = cytidine-3'-phosphate
  modified_base 18: mod_base = OTHER; note = cytidine-3'-phosphate
  modified_base 19: mod_base = OTHER; note = adenosine-3'-phosphate
  misc_feature 1..19: note = RNA
  misc_feature 20..21: note = DNA
actcatgcccgcgcagccatt

SEQ ID NO: 1403 - DNA, 21 bp, synthetic construct
  source 1..21: mol_type = other DNA
  modified_base 1: mod_base = OTHER; note = cytidine-3'-phosphate
  modified_base 2: mod_base = OTHER; note = guanosine-3'-phosphate
  modified_base 3: mod_base = OTHER; note = cytidine-3'-phosphate
  modified_base 4: mod_base = OTHER; note = adenosine-3'-phosphate
  modified_base 5: mod_base = OTHER; note = guanosine-3'-phosphate
  modified_base 6: mod_base = OTHER; note = cytidine-3'-phosphate
  modified_base 7: mod_base = OTHER; note = cytidine-3'-phosphate
  modified_base 8: mod_base = OTHER; note = guanosine-3'-phosphate
  modified_base 9: mod_base = OTHER; note = guanosine-3'-phosphate
  modified_base 10: mod_base = OTHER; note = cytidine-3'-phosphate
  modified_base 11: mod_base = OTHER; note = adenosine-3'-phosphate
  modified_base 12: mod_base = OTHER; note = cytidine-3'-phosphate
  modified_base 13: mod_base = OTHER; note = cytidine-3'-phosphate
  modified_base 14: mod_base = OTHER; note = guanosine-3'-phosphate
  modified_base 15: mod_base = OTHER; note = cytidine-3'-phosphate
  modified_base 16: mod_base = OTHER; note = cytidine-3'-phosphate
  modified_base 17: mod_base = OTHER; note = guanosine-3'-phosphate
  modified_base 18: mod_base = OTHER; note = adenosine-3'-phosphate
  modified_base 19: mod_base = OTHER; note = adenosine-3'-phosphate
  misc_feature 1..19: note = RNA
  misc_feature 20..21: note = DNA
cgcagccggcaccgccgaatt

SEQ ID NO: 1404 - DNA, 21 bp, synthetic construct
  source 1..21: mol_type = other DNA
  modified_base 1: mod_base = OTHER; note = adenosine-3'-phosphate
  modified_base 2: mod_base = OTHER; note = cytidine-3'-phosphate
  modified_base 3: mod_base = OTHER; note = cytidine-3'-phosphate
  modified_base 4: mod_base = OTHER; note = guanosine-3'-phosphate
  modified_base 5: mod_base = OTHER; note = cytidine-3'-phosphate
  modified_base 6: mod_base = OTHER; note = cytidine-3'-phosphate
  modified_base 7: mod_base = OTHER; note = guanosine-3'-phosphate
  modified_base 8: mod_base = OTHER; note = adenosine-3'-phosphate
  modified_base 9: mod_base = OTHER; note = adenosine-3'-phosphate
  modified_base 10: mod_base = OTHER; note = guanosine-3'-phosphate
  modified_base 11: mod_base = OTHER; note = cytidine-3'-phosphate
  modified_base 12: mod_base = OTHER; note = cytidine-3'-phosphate
  modified_base 13: mod_base = OTHER; note = uridine-3'-phosphate
  modified_base 14: mod_base = OTHER; note = cytidine-3'-phosphate
  modified_base 15: mod_base = OTHER; note = adenosine-3'-phosphate
  modified_base 16: mod_base = OTHER; note = guanosine-3'-phosphate
  modified_base 17: mod_base = OTHER; note = cytidine-3'-phosphate
  modified_base 18: mod_base = OTHER; note = cytidine-3'-phosphate
  modified_base 19: mod_base = OTHER; note = adenosine-3'-phosphate
  misc_feature 1..19: note = RNA
  misc_feature 20..21: note = DNA
accgccgaagcctcagccatt

SEQ ID NO: 1405 - DNA, 21 bp, synthetic construct
  source 1..21: mol_type = other DNA
  modified_base 1: mod_base = OTHER; note = uridine-3'-phosphate
  modified_base 2: mod_base = OTHER; note = cytidine-3'-phosphate
  modified_base 3: mod_base = OTHER; note = adenosine-3'-phosphate
  modified_base 4: mod_base = OTHER; note = guanosine-3'-phosphate
  modified_base 5: mod_base = OTHER; note = cytidine-3'-phosphate
  modified_base 6: mod_base = OTHER; note = cytidine-3'-phosphate
  modified_base 7: mod_base = OTHER; note = cytidine-3'-phosphate
  modified_base 8: mod_base = OTHER; note = adenosine-3'-phosphate
  modified_base 9: mod_base = OTHER; note = cytidine-3'-phosphate
  modified_base 10: mod_base = OTHER; note = guanosine-3'-phosphate
  modified_base 11: mod_base = OTHER; note = adenosine-3'-phosphate
  modified_base 12: mod_base = OTHER; note = cytidine-3'-phosphate
  modified_base 13: mod_base = OTHER; note = cytidine-3'-phosphate
  modified_base 14: mod_base = OTHER; note = cytidine-3'-phosphate
  modified_base 15: mod_base = OTHER; note = guanosine-3'-phosphate
  modified_base 16: mod_base = OTHER; note = guanosine-3'-phosphate
  modified_base 17: mod_base = OTHER; note = adenosine-3'-phosphate
  modified_base 18: mod_base = OTHER; note = cytidine-3'-phosphate
  modified_base 19: mod_base = OTHER; note = adenosine-3'-phosphate
  misc_feature 1..19: note = RNA
  misc_feature 20..21: note = DNA
tcagcccacgacccggacatt

SEQ ID NO: 1406 - DNA, 21 bp, synthetic construct
  source 1..21: mol_type = other DNA
  modified_base 1: mod_base = OTHER; note = adenosine-3'-phosphate
  modified_base 2: mod_base = OTHER; note = cytidine-3'-phosphate
  modified_base 3: mod_base = OTHER; note = cytidine-3'-phosphate
  modified_base 4: mod_base = OTHER; note = cytidine-3'-phosphate
  modified_base 5: mod_base = OTHER; note = guanosine-3'-phosphate
  modified_base 6: mod_base = OTHER; note = guanosine-3'-phosphate
  modified_base 7: mod_base = OTHER; note = adenosine-3'-phosphate
  modified_base 8: mod_base = OTHER; note = cytidine-3'-phosphate
  modified_base 9: mod_base = OTHER; note = cytidine-3'-phosphate
  modified_base 10: mod_base = OTHER; note = cytidine-3'-phosphate
  modified_base 11: mod_base = OTHER; note = cytidine-3'-phosphate
  modified_base 12: mod_base = OTHER; note = guanosine-3'-phosphate
  modified_base 13: mod_base = OTHER; note = cytidine-3'-phosphate
  modified_base 14: mod_base = OTHER; note = cytidine-3'-phosphate
  modified_base 15: mod_base = OTHER; note = uridine-3'-phosphate
  modified_base 16: mod_base = OTHER; note = cytidine-3'-phosphate
  modified_base 17: mod_base = OTHER; note = adenosine-3'-phosphate
  modified_base 18: mod_base = OTHER; note = guanosine-3'-phosphate
  modified_base 19: mod_base = OTHER; note = uridine-3'-phosphate
  misc_feature 1..19: note = RNA
  misc_feature 20..21: note = DNA
acccggaccccgcctcagttt

SEQ ID NO: 1407 - DNA, 21 bp, synthetic construct
  source 1..21: mol_type = other DNA
  modified_base 1: mod_base = OTHER; note = cytidine-3'-phosphate
  modified_base 2: mod_base = OTHER; note = cytidine-3'-phosphate
  modified_base 3: mod_base = OTHER; note = uridine-3'-phosphate
  modified_base 4: mod_base = OTHER; note = cytidine-3'-phosphate
  modified_base 5: mod_base = OTHER; note = adenosine-3'-phosphate
  modified_base 6: mod_base = OTHER; note = guanosine-3'-phosphate
  modified_base 7: mod_base = OTHER; note = uridine-3'-phosphate
  modified_base 8: mod_base = OTHER; note = cytidine-3'-phosphate
  modified_base 9: mod_base = OTHER; note = cytidine-3'-phosphate
  modified_base 10: mod_base = OTHER; note = cytidine-3'-phosphate
  modified_base 11: mod_base = OTHER; note = adenosine-3'-phosphate
  modified_base 12: mod_base = OTHER; note = guanosine-3'-phosphate
  modified_base 13: mod_base = OTHER; note = adenosine-3'-phosphate
  modified_base 14: mod_base = OTHER; note = cytidine-3'-phosphate
  modified_base 15: mod_base = OTHER; note = cytidine-3'-phosphate
  modified_base 16: mod_base = OTHER; note = cytidine-3'-phosphate
  modified_base 17: mod_base = OTHER; note = cytidine-3'-phosphate
  modified_base 18: mod_base = OTHER; note = guanosine-3'-phosphate
  modified_base 19: mod_base = OTHER; note = adenosine-3'-phosphate
  misc_feature 1..19: note = RNA
  misc_feature 20..21: note = DNA
cctcagtcccagaccccgatt

SEQ ID NO: 1408 - DNA, 21 bp, synthetic construct
  source 1..21: mol_type = other DNA
  modified_base 1: mod_base = OTHER; note = adenosine-3'-phosphate
  modified_base 2: mod_base = OTHER; note = guanosine-3'-phosphate
  modified_base 3: mod_base = OTHER; note = adenosine-3'-phosphate
  modified_base 4: mod_base = OTHER; note = cytidine-3'-phosphate
  modified_base 5: mod_base = OTHER; note = cytidine-3'-phosphate
  modified_base 6: mod_base = OTHER; note = cytidine-3'-phosphate
  modified_base 7: mod_base = OTHER; note = cytidine-3'-phosphate
  modified_base 8: mod_base = OTHER; note = guanosine-3'-phosphate
  modified_base 9: mod_base = OTHER; note = guanosine-3'-phosphate
  modified_base 10: mod_base = OTHER; note = guanosine-3'-phosphate
  modified_base 11: mod_base = OTHER; note = adenosine-3'-phosphate
  modified_base 12: mod_base = OTHER; note = guanosine-3'-phosphate
  modified_base 13: mod_base = OTHER; note = cytidine-3'-phosphate
  modified_base 14: mod_base = OTHER; note = cytidine-3'-phosphate
  modified_base 15: mod_base = OTHER; note = uridine-3'-phosphate
  modified_base 16: mod_base = OTHER; note = uridine-3'-phosphate
  modified_base 17: mod_base = OTHER; note = guanosine-3'-phosphate
  modified_base 18: mod_base = OTHER; note = cytidine-3'-phosphate
  modified_base 19: mod_base = OTHER; note = adenosine-3'-phosphate
  misc_feature 1..19: note = RNA
  misc_feature 20..21: note = DNA
agaccccgggagccttgcatt

SEQ ID NO: 1409 - DNA, 21 bp, synthetic construct
  source 1..21: mol_type = other DNA
  modified_base 1: mod_base = OTHER; note = cytidine-3'-phosphate
  modified_base 2: mod_base = OTHER; note = cytidine-3'-phosphate
  modified_base 3: mod_base = OTHER; note = uridine-3'-phosphate
  modified_base 4: mod_base = OTHER; note = uridine-3'-phosphate
  modified_base 5: mod_base = OTHER; note = guanosine-3'-phosphate
  modified_base 6: mod_base = OTHER; note = cytidine-3'-phosphate
  modified_base 7: mod_base = OTHER; note = cytidine-3'-phosphate
  modified_base 8: mod_base = OTHER; note = guanosine-3'-phosphate
  modified_base 9: mod_base = OTHER; note = guanosine-3'-phosphate
  modified_base 10: mod_base = OTHER; note = cytidine-3'-phosphate
  modified_base 11: mod_base = OTHER; note = guanosine-3'-phosphate
  modified_base 12: mod_base = OTHER; note = adenosine-3'-phosphate
  modified_base 13: mod_base = OTHER; note = adenosine-3'-phosphate
  modified_base 14: mod_base = OTHER; note = guanosine-3'-phosphate
  modified_base 15: mod_base = OTHER; note = cytidine-3'-phosphate
  modified_base 16: mod_base = OTHER; note = guanosine-3'-phosphate
  modified_base 17: mod_base = OTHER; note = guanosine-3'-phosphate
  modified_base 18: mod_base = OTHER; note = guanosine-3'-phosphate
  modified_base 19: mod_base = OTHER; note = adenosine-3'-phosphate
  misc_feature 1..19: note = RNA
  misc_feature 20..21: note = DNA
ccttgccggcgaagcgggatt

SEQ ID NO: 1410 - DNA, 21 bp, synthetic construct
  source 1..21: mol_type = other DNA
  modified_base 1: mod_base = OTHER; note = adenosine-3'-phosphate
  modified_base 2: mod_base = OTHER; note = adenosine-3'-phosphate
  modified_base 3: mod_base = OTHER; note = guanosine-3'-phosphate
  modified_base 4: mod_base = OTHER; note = cytidine-3'-phosphate
  modified_base 5: mod_base = OTHER; note = guanosine-3'-phosphate
  modified_base 6: mod_base = OTHER; note = guanosine-3'-phosphate
  modified_base 7: mod_base = OTHER; note = guanosine-3'-phosphate
  modified_base 8: mod_base = OTHER; note = adenosine-3'-phosphate
  modified_base 9: mod_base = OTHER; note = guanosine-3'-phosphate
  modified_base 10: mod_base = OTHER; note = cytidine-3'-phosphate
  modified_base 11: mod_base = OTHER; note = adenosine-3'-phosphate
  modified_base 12: mod_base = OTHER; note = guanosine-3'-phosphate
  modified_base 13: mod_base = OTHER; note = cytidine-3'-phosphate
  modified_base 14: mod_base = OTHER; note = cytidine-3'-phosphate
  modified_base 15: mod_base = OTHER; note = guanosine-3'-phosphate
  modified_base 16: mod_base = OTHER; note = cytidine-3'-phosphate
  modified_base 17: mod_base = OTHER; note = cytidine-3'-phosphate
  modified_base 18: mod_base = OTHER; note = uridine-3'-phosphate
  modified_base 19: mod_base = OTHER; note = uridine-3'-phosphate
  misc_feature 1..19: note = RNA
  misc_feature 20..21: note = DNA
aagcgggagcagccgcctttt

SEQ ID NO: 1411 - DNA, 21 bp, synthetic construct
  source 1..21: mol_type = other DNA
  modified_base 1: mod_base = OTHER; note = adenosine-3'-phosphate
  modified_base 2: mod_base = OTHER; note = guanosine-3'-phosphate
  modified_base 3: mod_base = OTHER; note = cytidine-3'-phosphate
  modified_base 4: mod_base = OTHER; note = cytidine-3'-phosphate
  modified_base 5: mod_base = OTHER; note = guanosine-3'-phosphate
  modified_base 6: mod_base = OTHER; note = cytidine-3'-phosphate
  modified_base 7: mod_base = OTHER; note = cytidine-3'-phosphate
  modified_base 8: mod_base = OTHER; note = uridine-3'-phosphate
  modified_base 9: mod_base = OTHER; note = uridine-3'-phosphate
  modified_base 10: mod_base = OTHER; note = cytidine-3'-phosphate
  modified_base 11: mod_base = OTHER; note = cytidine-3'-phosphate
  modified_base 12: mod_base = OTHER; note = cytidine-3'-phosphate
  modified_base 13: mod_base = OTHER; note = uridine-3'-phosphate
  modified_base 14: mod_base = OTHER; note = guanosine-3'-phosphate
  modified_base 15: mod_base = OTHER; note = adenosine-3'-phosphate
  modified_base 16: mod_base = OTHER; note = cytidine-3'-phosphate
  modified_base 17: mod_base = OTHER; note = cytidine-3'-phosphate
  modified_base 18: mod_base = OTHER; note = adenosine-3'-phosphate
  modified_base 19: mod_base = OTHER; note = adenosine-3'-phosphate
  misc_feature 1..19: note = RNA
  misc_feature 20..21: note = DNA
agccgccttccctgaccaatt

SEQ ID NO: 1412 - DNA, 21 bp, synthetic construct
  source 1..21: mol_type = other DNA
  modified_base 1: mod_base = OTHER; note = uridine-3'-phosphate
  modified_base 2: mod_base = OTHER; note = guanosine-3'-phosphate
  modified_base 3: mod_base = OTHER; note = adenosine-3'-phosphate
  modified_base 4: mod_base = OTHER; note = cytidine-3'-phosphate
  modified_base 5: mod_base = OTHER; note = cytidine-3'-phosphate
  modified_base 6: mod_base = OTHER; note = adenosine-3'-phosphate
  modified_base 7: mod_base = OTHER; note = guanosine-3'-phosphate
  modified_base 8: mod_base = OTHER; note = guanosine-3'-phosphate
  modified_base 9: mod_base = OTHER; note = adenosine-3'-phosphate
  modified_base 10: mod_base = OTHER; note = adenosine-3'-phosphate
  modified_base 11: mod_base = OTHER; note = cytidine-3'-phosphate
  modified_base 12: mod_base = OTHER; note = guanosine-3'-phosphate
  modified_base 13: mod_base = OTHER; note = guanosine-3'-phosphate
  modified_base 14: mod_base = OTHER; note = cytidine-3'-phosphate
  modified_base 15: mod_base = OTHER; note = cytidine-3'-phosphate
  modified_base 16: mod_base = OTHER; note = cytidine-3'-phosphate
  modified_base 17: mod_base = OTHER; note = adenosine-3'-phosphate
  modified_base 18: mod_base = OTHER; note = cytidine-3'-phosphate
  modified_base 19: mod_base = OTHER; note = uridine-3'-phosphate
  misc_feature 1..19: note = RNA
  misc_feature 20..21: note = DNA
tgaccaggaacggcccacttt

SEQ ID NO: 1413 - DNA, 21 bp, synthetic construct
  source 1..21: mol_type = other DNA
  modified_base 1: mod_base = OTHER; note = cytidine-3'-phosphate
  modified_base 2: mod_base = OTHER; note = guanosine-3'-phosphate
  modified_base 3: mod_base = OTHER; note = guanosine-3'-phosphate
  modified_base 4: mod_base = OTHER; note = cytidine-3'-phosphate
  modified_base 5: mod_base = OTHER; note = cytidine-3'-phosphate
  modified_base 6: mod_base = OTHER; note = cytidine-3'-phosphate
  modified_base 7: mod_base = OTHER; note = adenosine-3'-phosphate
  modified_base 8: mod_base = OTHER; note = cytidine-3'-phosphate
  modified_base 9: mod_base = OTHER; note = uridine-3'-phosphate
  modified_base 10: mod_base = OTHER; note = guanosine-3'-phosphate
  modified_base 11: mod_base = OTHER; note = adenosine-3'-phosphate
  modified_base 12: mod_base = OTHER; note = guanosine-3'-phosphate
  modified_base 13: mod_base = OTHER; note = cytidine-3'-phosphate
  modified_base 14: mod_base = OTHER; note = uridine-3'-phosphate
  modified_base 15: mod_base = OTHER; note = guanosine-3'-phosphate
  modified_base 16: mod_base = OTHER; note = cytidine-3'-phosphate
  modified_base 17: mod_base = OTHER; note = guanosine-3'-phosphate
  modified_base 18: mod_base = OTHER; note = guanosine-3'-phosphate
  modified_base 19: mod_base = OTHER; note = adenosine-3'-phosphate
  misc_feature 1..19: note = RNA
  misc_feature 20..21: note = DNA
cggcccactgagctgcggatt

SEQ ID NO: 1414 - DNA, 21 bp, synthetic construct
  source 1..21: mol_type = other DNA
  modified_base 1: mod_base = OTHER; note = uridine-3'-phosphate
  modified_base 2: mod_base = OTHER; note = guanosine-3'-phosphate
  modified_base 3: mod_base = OTHER; note = cytidine-3'-phosphate
  modified_base 4: mod_base = OTHER; note = guanosine-3'-phosphate
  modified_base 5: mod_base = OTHER; note = guanosine-3'-phosphate
  modified_base 6: mod_base = OTHER; note = guanosine-3'-phosphate
  modified_base 7: mod_base = OTHER; note = cytidine-3'-phosphate
  modified_base 8: mod_base = OTHER; note = adenosine-3'-phosphate
  modified_base 9: mod_base = OTHER; note = guanosine-3'-phosphate
  modified_base 10: mod_base = OTHER; note = cytidine-3'-phosphate
  modified_base 11: mod_base = OTHER; note = guanosine-3'-phosphate
  modified_base 12: mod_base = OTHER; note = guanosine-3'-phosphate
  modified_base 13: mod_base = OTHER; note = cytidine-3'-phosphate
  modified_base 14: mod_base = OTHER; note = uridine-3'-phosphate
  modified_base 15: mod_base = OTHER; note = cytidine-3'-phosphate
  modified_base 16: mod_base = OTHER; note = cytidine-3'-phosphate
  modified_base 17: mod_base = OTHER; note = guanosine-3'-phosphate
  modified_base 18: mod_base = OTHER; note = cytidine-3'-phosphate
  modified_base 19: mod_base = OTHER; note = adenosine-3'-phosphate
  misc_feature 1..19: note = RNA
  misc_feature 20..21: note = DNA
tgcgggcagcggctccgcatt

SEQ ID NO: 1415 - DNA, 21 bp, synthetic construct
  source 1..21: mol_type = other DNA
  modified_base 1: mod_base = OTHER; note = cytidine-3'-phosphate
  modified_base 2: mod_base = OTHER; note = guanosine-3'-phosphate
  modified_base 3: mod_base = OTHER; note = guanosine-3'-phosphate
  modified_base 4: mod_base = OTHER; note = cytidine-3'-phosphate
  modified_base 5: mod_base = OTHER; note = uridine-3'-phosphate
  modified_base 6: mod_base = OTHER; note = cytidine-3'-phosphate
  modified_base 7: mod_base = OTHER; note = cytidine-3'-phosphate
  modified_base 8: mod_base = OTHER; note = guanosine-3'-phosphate
  modified_base 9: mod_base = OTHER; note = cytidine-3'-phosphate
  modified_base 10: mod_base = OTHER; note = adenosine-3'-phosphate
  modified_base 11: mod_base = OTHER; note = adenosine-3'-phosphate
  modified_base 12: mod_base = OTHER; note = guanosine-3'-phosphate
  modified_base 13: mod_base = OTHER; note = adenosine-3'-phosphate
  modified_base 14: mod_base = OTHER; note = guanosine-3'-phosphate
  modified_base 15: mod_base = OTHER; note = uridine-3'-phosphate
  modified_base 16: mod_base = OTHER; note = cytidine-3'-phosphate
  modified_base 17: mod_base = OTHER; note = uridine-3'-phosphate
  modified_base 18: mod_base = OTHER; note = guanosine-3'-phosphate
  modified_base 19: mod_base = OTHER; note = uridine-3'-phosphate
  misc_feature 1..19: note = RNA
  misc_feature 20..21: note = DNA
cggctccgcaagagtctgttt

SEQ ID NO: 1416 - DNA, 21 bp, synthetic construct
  source 1..21: mol_type = other DNA
  modified_base 1: mod_base = OTHER; note = adenosine-3'-phosphate
  modified_base 2: mod_base = OTHER; note = guanosine-3'-phosphate
  modified_base 3: mod_base = OTHER; note = uridine-3'-phosphate
  modified_base 4: mod_base = OTHER; note = cytidine-3'-phosphate
  modified_base 5: mod_base = OTHER; note = uridine-3'-phosphate
  modified_base 6: mod_base = OTHER; note = guanosine-3'-phosphate
  modified_base 7: mod_base = OTHER; note = uridine-3'-phosphate
  modified_base 8: mod_base = OTHER; note = cytidine-3'-phosphate
  modified_base 9: mod_base = OTHER; note = uridine-3'-phosphate
  modified_base 10: mod_base = OTHER; note = uridine-3'-phosphate
  modified_base 11: mod_base = OTHER; note = cytidine-3'-phosphate
  modified_base 12: mod_base = OTHER; note = guanosine-3'-phosphate
  modified_base 13: mod_base = OTHER; note = adenosine-3'-phosphate
  modified_base 14: mod_base = OTHER; note = uridine-3'-phosphate
  modified_base 15: mod_base = OTHER; note = guanosine-3'-phosphate
  modified_base 16: mod_base = OTHER; note = adenosine-3'-phosphate
  modified_base 17: mod_base = OTHER; note = cytidine-3'-phosphate
  modified_base 18: mod_base = OTHER; note = cytidine-3'-phosphate
  modified_base 19: mod_base = OTHER; note = adenosine-3'-phosphate
  misc_feature 1..19: note = RNA
  misc_feature 20..21: note = DNA
agtctgtcttcgatgaccatt

SEQ ID NO: 1417 - DNA, 21 bp, synthetic construct
  source 1..21: mol_type = other DNA
  modified_base 1: mod_base = OTHER; note = cytidine-3'-phosphate
  modified_base 2: mod_base = OTHER; note = guanosine-3'-phosphate
  modified_base 3: mod_base = OTHER; note = adenosine-3'-phosphate
  modified_base 4: mod_base = OTHER; note = uridine-3'-phosphate
  modified_base 5: mod_base = OTHER; note = guanosine-3'-phosphate
  modified_base 6: mod_base = OTHER; note = adenosine-3'-phosphate
  modified_base 7: mod_base = OTHER; note = cytidine-3'-phosphate
  modified_base 8: mod_base = OTHER; note = cytidine-3'-phosphate
  modified_base 9: mod_base = OTHER; note = cytidine-3'-phosphate
  modified_base 10: mod_base = OTHER; note = guanosine-3'-phosphate
  modified_base 11: mod_base = OTHER; note = cytidine-3'-phosphate
  modified_base 12: mod_base = OTHER; note = guanosine-3'-phosphate
  modified_base 13: mod_base = OTHER; note = uridine-3'-phosphate
  modified_base 14: mod_base = OTHER; note = cytidine-3'-phosphate
  modified_base 15: mod_base = OTHER; note = guanosine-3'-phosphate
  modified_base 16: mod_base = OTHER; note = uridine-3'-phosphate
  modified_base 17: mod_base = OTHER; note = uridine-3'-phosphate
  modified_base 18: mod_base = OTHER; note = guanosine-3'-phosphate
  modified_base 19: mod_base = OTHER; note = adenosine-3'-phosphate
  misc_feature 1..19: note = RNA
  misc_feature 20..21: note = DNA
cgatgacccgcgtcgttgatt

SEQ ID NO: 1418 - DNA, 21 bp, synthetic construct
  source 1..21: mol_type = other DNA
  modified_base 1: mod_base = OTHER; note = uridine-3'-phosphate
  modified_base 2: mod_base = OTHER; note = cytidine-3'-phosphate
  modified_base 3: mod_base = OTHER; note = guanosine-3'-phosphate
  modified_base 4: mod_base = OTHER; note = uridine-3'-phosphate
  modified_base 5: mod_base = OTHER; note = uridine-3'-phosphate
  modified_base 6: mod_base = OTHER; note = guanosine-3'-phosphate
  modified_base 7: mod_base = OTHER; note = guanosine-3'-phosphate
  modified_base 8: mod_base = OTHER; note = cytidine-3'-phosphate
  modified_base 9: mod_base = OTHER; note = guanosine-3'-phosphate
  modified_base 10: mod_base = OTHER; note = guanosine-3'-phosphate
  modified_base 11: mod_base = OTHER; note = guanosine-3'-phosphate
  modified_base 12: mod_base = OTHER; note = cytidine-3'-phosphate
  modified_base 13: mod_base = OTHER; note = uridine-3'-phosphate
  modified_base 14: mod_base = OTHER; note = guanosine-3'-phosphate
  modified_base 15: mod_base = OTHER; note = guanosine-3'-phosphate
  modified_base 16: mod_base = OTHER; note = uridine-3'-phosphate
  modified_base 17: mod_base = OTHER; note = guanosine-3'-phosphate
  modified_base 18: mod_base = OTHER; note = guanosine-3'-phosphate
  modified_base 19: mod_base = OTHER; note = adenosine-3'-phosphate
  misc_feature 1..19: note = RNA
  misc_feature 20..21: note = DNA
tcgttggcgggctggtggatt

SEQ ID NO: 1419 - DNA, 21 bp, synthetic construct
  source 1..21: mol_type = other DNA
  modified_base 1: mod_base = OTHER; note = uridine-3'-phosphate
  modified_base 2: mod_base = OTHER; note = guanosine-3'-phosphate
  modified_base 3: mod_base = OTHER; note = guanosine-3'-phosphate
  modified_base 4: mod_base = OTHER; note = uridine-3'-phosphate
  modified_base 5: mod_base = OTHER; note = guanosine-3'-phosphate
  modified_base 6: mod_base = OTHER; note = guanosine-3'-phosphate
  modified_base 7: mod_base = OTHER; note = cytidine-3'-phosphate
  modified_base 8: mod_base = OTHER; note = guanosine-3'-phosphate
  modified_base 9: mod_base = OTHER; note = cytidine-3'-phosphate
  modified_base 10: mod_base = OTHER; note = uridine-3'-phosphate
  modified_base 11: mod_base = OTHER; note = adenosine-3'-phosphate
  modified_base 12: mod_base = OTHER; note = cytidine-3'-phosphate
  modified_base 13: mod_base = OTHER; note = guanosine-3'-phosphate
  modified_base 14: mod_base = OTHER; note = cytidine-3'-phosphate
  modified_base 15: mod_base = OTHER; note = guanosine-3'-phosphate
  modified_base 16: mod_base = OTHER; note = guanosine-3'-phosphate
  modified_base 17: mod_base = OTHER; note = guanosine-3'-phosphate
  modified_base 18: mod_base = OTHER; note = guanosine-3'-phosphate
  modified_base 19: mod_base = OTHER; note = adenosine-3'-phosphate
  misc_feature 1..19: note = RNA
  misc_feature 20..21: note = DNA
tggtggcgctacgcggggatt

SEQ ID NO: 1420 - DNA, 21 bp, synthetic construct
  source 1..21: mol_type = other DNA
  modified_base 1: mod_base = OTHER; note = uridine-3'-phosphate
  modified_base 2: mod_base = OTHER; note = adenosine-3'-phosphate
  modified_base 3: mod_base = OTHER; note = cytidine-3'-phosphate
  modified_base 4: mod_base = OTHER; note = guanosine-3'-phosphate
  modified_base 5: mod_base = OTHER; note = cytidine-3'-phosphate
  modified_base 6: mod_base = OTHER; note = guanosine-3'-phosphate
  modified_base 7: mod_base = OTHER; note = guanosine-3'-phosphate
  modified_base 8: mod_base = OTHER; note = guanosine-3'-phosphate
  modified_base 9: mod_base = OTHER; note = guanosine-3'-phosphate
  modified_base 10: mod_base = OTHER; note = cytidine-3'-phosphate
  modified_base 11: mod_base = OTHER; note = guanosine-3'-phosphate
  modified_base 12: mod_base = OTHER; note = cytidine-3'-phosphate
  modified_base 13: mod_base = OTHER; note = adenosine-3'-phosphate
  modified_base 14: mod_base = OTHER; note = cytidine-3'-phosphate
  modified_base 15: mod_base = OTHER; note = cytidine-3'-phosphate
  modified_base 16: mod_base = OTHER; note = cytidine-3'-phosphate
  modified_base 17: mod_base = OTHER; note = cytidine-3'-phosphate
  modified_base 18: mod_base = OTHER; note = uridine-3'-phosphate
  modified_base 19: mod_base = OTHER; note = adenosine-3'-phosphate
  misc_feature 1..19: note = RNA
  misc_feature 20..21: note = DNA
tacgcggggcgcacccctatt

SEQ ID NO: 1421 - DNA, 21 bp, synthetic construct
  source 1..21: mol_type = other DNA
  modified_base 1: mod_base = OTHER; note = adenosine-3'-phosphate
  modified_base 2: mod_base = OTHER; note = cytidine-3'-phosphate
  modified_base 3: mod_base = OTHER; note = cytidine-3'-phosphate
  modified_base 4: mod_base = OTHER; note = cytidine-3'-phosphate
  modified_base 5: mod_base = OTHER; note = cytidine-3'-phosphate
  modified_base 6: mod_base = OTHER; note = uridine-3'-phosphate
  modified_base 7: mod_base = OTHER; note = adenosine-3'-phosphate
  modified_base 8: mod_base = OTHER; note = cytidine-3'-phosphate
  modified_base 9: mod_base = OTHER; note = adenosine-3'-phosphate
  modified_base 10: mod_base = OTHER; note = uridine-3'-phosphate
  modified_base 11: mod_base = OTHER; note = cytidine-3'-phosphate
  modified_base 12: mod_base = OTHER; note = guanosine-3'-phosphate
  modified_base 13: mod_base = OTHER; note = cytidine-3'-phosphate
  modified_base 14: mod_base = OTHER; note = cytidine-3'-phosphate
  modified_base 15: mod_base = OTHER; note = guanosine-3'-phosphate
  modified_base 16: mod_base = OTHER; note = cytidine-3'-phosphate
  modified_base 17: mod_base = OTHER; note = guanosine-3'-phosphate
  modified_base 18: mod_base = OTHER; note = cytidine-3'-phosphate
  modified_base 19: mod_base = OTHER; note = uridine-3'-phosphate
  misc_feature 1..19: note = RNA
  misc_feature 20..21: note = DNA
acccctacatcgccgcgcttt

SEQ ID NO: 1422 - DNA, 21 bp, synthetic construct
  source 1..21: mol_type = other DNA
  modified_base 1: mod_base = OTHER; note = guanosine-3'-phosphate
  modified_base 2: mod_base = OTHER; note = cytidine-3'-phosphate
  modified_base 3: mod_base = OTHER; note = cytidine-3'-phosphate
  modified_base 4: mod_base = OTHER; note = guanosine-3'-phosphate
  modified_base 5: mod_base = OTHER; note = cytidine-3'-phosphate
  modified_base 6: mod_base = OTHER; note = guanosine-3'-phosphate
  modified_base 7: mod_base = OTHER; note = cytidine-3'-phosphate
  modified_base 8: mod_base = OTHER; note = uridine-3'-phosphate
  modified_base 9: mod_base = OTHER; note = guanosine-3'-phosphate
  modified_base 10: mod_base = OTHER; note = uridine-3'-phosphate
  modified_base 11: mod_base = OTHER; note = adenosine-3'-phosphate
  modified_base 12: mod_base = OTHER; note = cytidine-3'-phosphate
  modified_base 13: mod_base = OTHER; note = uridine-3'-phosphate
  modified_base 14: mod_base = OTHER; note = guanosine-3'-phosphate
  modified_base 15: mod_base = OTHER; note = guanosine-3'-phosphate
  modified_base 16: mod_base = OTHER; note = guanosine-3'-phosphate
  modified_base 17: mod_base = OTHER; note = guanosine-3'-phosphate
  modified_base 18: mod_base = OTHER; note = cytidine-3'-phosphate
  modified_base 19: mod_base = OTHER; note = adenosine-3'-phosphate
  misc_feature 1..19: note = RNA
  misc_feature 20..21: note = DNA
gccgcgctgtactggggcatt

SEQ ID NO: 1423 - DNA, 21 bp, synthetic construct
  source 1..21: mol_type = other DNA
  modified_base 1: mod_base = OTHER; note = cytidine-3'-phosphate
  modified_base 2: mod_base = OTHER; note = uridine-3'-phosphate
  modified_base 3: mod_base = OTHER; note = guanosine-3'-phosphate
  modified_base 4: mod_base = OTHER; note = guanosine-3'-phosphate
  modified_base 5: mod_base = OTHER; note = guanosine-3'-phosphate
  modified_base 6: mod_base = OTHER; note = guanosine-3'-phosphate
  modified_base 7: mod_base = OTHER; note = cytidine-3'-phosphate
  modified_base 8: mod_base = OTHER; note = cytidine-3'-phosphate
  modified_base 9: mod_base = OTHER; note = adenosine-3'-phosphate
  modified_base 10: mod_base = OTHER; note = cytidine-3'-phosphate
  modified_base 11: mod_base = OTHER; note = adenosine-3'-phosphate
  modified_base 12: mod_base = OTHER; note = guanosine-3'-phosphate
  modified_base 13: mod_base = OTHER; note = uridine-3'-phosphate
  modified_base 14: mod_base = OTHER; note = uridine-3'-phosphate
  modified_base 15: mod_base = OTHER; note = uridine-3'-phosphate
  modified_base 16: mod_base = OTHER; note = cytidine-3'-phosphate
  modified_base 17: mod_base = OTHER; note = uridine-3'-phosphate
  modified_base 18: mod_base = OTHER; note = guanosine-3'-phosphate
  modified_base 19: mod_base = OTHER; note = adenosine-3'-phosphate
  misc_feature 1..19: note = RNA
  misc_feature 20..21: note = DNA
ctggggccacagtttctgatt

SEQ ID NO: 1424 - DNA, 21 bp, synthetic construct
  source 1..21: mol_type = other DNA
  modified_base 1: mod_base = OTHER; note = uridine-3'-phosphate
  modified_base 2: mod_base = OTHER; note = uridine-3'-phosphate
  modified_base 3: mod_base = OTHER; note = uridine-3'-phosphate
  modified_base 4: mod_base = OTHER; note = cytidine-3'-phosphate
  modified_base 5: mod_base = OTHER; note = uridine-3'-phosphate
  modified_base 6: mod_base = OTHER; note = guanosine-3'-phosphate
  modified_base 7: mod_base = OTHER; note = cytidine-3'-phosphate
  modified_base 8: mod_base = OTHER; note = guanosine-3'-phosphate
  modified_base 9: mod_base = OTHER; note = cytidine-3'-phosphate
  modified_base 10: mod_base = OTHER; note = cytidine-3'-phosphate
  modified_base 11: mod_base = OTHER; note = guanosine-3'-phosphate
  modified_base 12: mod_base = OTHER; note = guanosine-3'-phosphate
  modified_base 13: mod_base = OTHER; note = cytidine-3'-phosphate
  modified_base 14: mod_base = OTHER; note = adenosine-3'-phosphate
  modified_base 15: mod_base = OTHER; note = guanosine-3'-phosphate
  modified_base 16: mod_base = OTHER; note = cytidine-3'-phosphate
  modified_base 17: mod_base = OTHER; note = cytidine-3'-phosphate
  modified_base 18: mod_base = OTHER; note = uridine-3'-phosphate
  modified_base 19: mod_base = OTHER; note = adenosine-3'-phosphate
  misc_feature 1..19: note = RNA
  misc_feature 20..21: note = DNA
tttctgcgccggcagcctatt

SEQ ID NO: 1425 - DNA, 21 bp, synthetic construct
  source 1..21: mol_type = other DNA
  modified_base 1: mod_base = OTHER; note = cytidine-3'-phosphate
  modified_base 2: mod_base = OTHER; note = guanosine-3'-phosphate
  modified_base 3: mod_base = OTHER; note = guanosine-3'-phosphate
  modified_base 4: mod_base = OTHER; note = cytidine-3'-phosphate
  modified_base 5: mod_base = OTHER; note = adenosine-3'-phosphate
  modified_base 6: mod_base = OTHER; note = guanosine-3'-phosphate
  modified_base 7: mod_base = OTHER; note = cytidine-3'-phosphate
  modified_base 8: mod_base = OTHER; note = cytidine-3'-phosphate
  modified_base 9: mod_base = OTHER; note = uridine-3'-phosphate
  modified_base 10: mod_base = OTHER; note = cytidine-3'-phosphate
  modified_base 11: mod_base = OTHER; note = adenosine-3'-phosphate
  modified_base 12: mod_base = OTHER; note = uridine-3'-phosphate
  modified_base 13: mod_base = OTHER; note = cytidine-3'-phosphate
  modified_base 14: mod_base = OTHER; note = guanosine-3'-phosphate
  modified_base 15: mod_base = OTHER; note = cytidine-3'-phosphate
  modified_base 16: mod_base = OTHER; note = cytidine-3'-phosphate
  modified_base 17: mod_base = OTHER; note = cytidine-3'-phosphate
  modified_base 18: mod_base = OTHER; note = cytidine-3'-phosphate
  modified_base 19: mod_base = OTHER; note = adenosine-3'-phosphate
  misc_feature 1..19: note = RNA
  misc_feature 20..21: note = DNA
cggcagcctcatcgccccatt

SEQ ID NO: 1426 - DNA, 21 bp, synthetic construct
  source 1..21: mol_type = other DNA
  modified_base 1: mod_base = OTHER; note = uridine-3'-phosphate
  modified_base 2: mod_base = OTHER; note = cytidine-3'-phosphate
  modified_base 3: mod_base = OTHER; note = guanosine-3'-phosphate
  modified_base 4: mod_base = OTHER; note = cytidine-3'-phosphate
  modified_base 5: mod_base = OTHER; note = cytidine-3'-phosphate
  modified_base 6: mod_base = OTHER; note = cytidine-3'-phosphate
  modified_base 7: mod_base = OTHER; note = cytidine-3'-phosphate
  modified_base 8: mod_base = OTHER; note = cytidine-3'-phosphate
  modified_base 9: mod_base = OTHER; note = uridine-3'-phosphate
  modified_base 10: mod_base = OTHER; note = guanosine-3'-phosphate
  modified_base 11: mod_base = OTHER; note = cytidine-3'-phosphate
  modified_base 12: mod_base = OTHER; note = uridine-3'-phosphate
  modified_base 13: mod_base = OTHER; note = guanosine-3'-phosphate
  modified_base 14: mod_base = OTHER; note = guanosine-3'-phosphate
  modified_base 15: mod_base = OTHER; note = guanosine-3'-phosphate
  modified_base 16: mod_base = OTHER; note = uridine-3'-phosphate
  modified_base 17: mod_base = OTHER; note = guanosine-3'-phosphate
  modified_base 18: mod_base = OTHER; note = cytidine-3'-phosphate
  modified_base 19: mod_base = OTHER; note = uridine-3'-phosphate
  misc_feature 1..19: note = RNA
  misc_feature 20..21: note = DNA
tcgccccctgctgggtgcttt

SEQ ID NO: 1427 - DNA, 21 bp, synthetic construct
  source 1..21: mol_type = other DNA
  modified_base 1: mod_base = OTHER; note = uridine-3'-phosphate
  modified_base 2: mod_base = OTHER; note = guanosine-3'-phosphate
  modified_base 3: mod_base = OTHER; note = guanosine-3'-phosphate
  modified_base 4: mod_base = OTHER; note = guanosine-3'-phosphate
  modified_base 5: mod_base = OTHER; note = uridine-3'-phosphate
  modified_base 6: mod_base = OTHER; note = guanosine-3'-phosphate
  modified_base 7: mod_base = OTHER; note = cytidine-3'-phosphate
  modified_base 8: mod_base = OTHER; note = uridine-3'-phosphate
  modified_base 9: mod_base = OTHER; note = guanosine-3'-phosphate
  modified_base 10: mod_base = OTHER; note = adenosine-3'-phosphate
  modified_base 11: mod_base = OTHER; note = cytidine-3'-phosphate
  modified_base 12: mod_base = OTHER; note = guanosine-3'-phosphate
  modified_base 13: mod_base = OTHER; note = guanosine-3'-phosphate
  modified_base 14: mod_base = OTHER; note = cytidine-3'-phosphate
  modified_base 15: mod_base = OTHER; note = cytidine-3'-phosphate
  modified_base 16: mod_base = OTHER; note = guanosine-3'-phosphate
  modified_base 17: mod_base = OTHER; note = cytidine-3'-phosphate
  modified_base 18: mod_base = OTHER; note = uridine-3'-phosphate
  modified_base 19: mod_base = OTHER; note = adenosine-3'-phosphate
  misc_feature 1..19: note = RNA
  misc_feature 20..21: note = DNA
tgggtgctgacggccgctatt

SEQ ID NO: 1428 - DNA, 21 bp, synthetic construct
  source 1..21: mol_type = other DNA
  modified_base 1: mod_base = OTHER; note = guanosine-3'-phosphate
  modified_base 2: mod_base = OTHER; note = cytidine-3'-phosphate
  modified_base 3: mod_base = OTHER; note = cytidine-3'-phosphate
  modified_base 4: mod_base = OTHER; note = guanosine-3'-phosphate
  modified_base 5: mod_base = OTHER; note = cytidine-3'-phosphate
  modified_base 6: mod_base = OTHER; note = uridine-3'-phosphate
  modified_base 7: mod_base = OTHER; note = cytidine-3'-phosphate
  modified_base 8: mod_base = OTHER; note = adenosine-3'-phosphate
  modified_base 9: mod_base = OTHER; note = cytidine-3'-phosphate
  modified_base 10: mod_base = OTHER; note = uridine-3'-phosphate
  modified_base 11: mod_base = OTHER; note = guanosine-3'-phosphate
  modified_base 12: mod_base = OTHER; note = cytidine-3'-phosphate
  modified_base 13: mod_base = OTHER; note = cytidine-3'-phosphate
  modified_base 14: mod_base = OTHER; note = uridine-3'-phosphate
  modified_base 15: mod_base = OTHER; note = guanosine-3'-phosphate
  modified_base 16: mod_base = OTHER; note = cytidine-3'-phosphate
  modified_base 17: mod_base = OTHER; note = adenosine-3'-phosphate
  modified_base 18: mod_base = OTHER; note = guanosine-3'-phosphate
  modified_base 19: mod_base = OTHER; note = adenosine-3'-phosphate
  misc_feature 1..19: note = RNA
  misc_feature 20..21: note = DNA
gccgctcactgcctgcagatt

SEQ ID NO: 1429 - DNA, 21 bp, synthetic construct
  source 1..21: mol_type = other DNA
  modified_base 1: mod_base = OTHER; note = cytidine-3'-phosphate
  modified_base 2: mod_base = OTHER; note = uridine-3'-phosphate
  modified_base 3: mod_base = OTHER; note = guanosine-3'-phosphate
  modified_base 4: mod_base = OTHER; note = cytidine-3'-phosphate
  modified_base 5: mod_base = OTHER; note = adenosine-3'-phosphate
  modified_base 6: mod_base = OTHER; note = guanosine-3'-phosphate
  modified_base 7: mod_base = OTHER; note = guanosine-3'-phosphate
  modified_base 8: mod_base = OTHER; note = adenosine-3'-phosphate
  modified_base 9: mod_base = OTHER; note = cytidine-3'-phosphate
  modified_base 10: mod_base = OTHER; note = cytidine-3'-phosphate
  modified_base 11: mod_base = OTHER; note = guanosine-3'-phosphate
  modified_base 12: mod_base = OTHER; note = guanosine-3'-phosphate
  modified_base 13: mod_base = OTHER; note = cytidine-3'-phosphate
  modified_base 14: mod_base = OTHER; note = cytidine-3'-phosphate
  modified_base 15: mod_base = OTHER; note = cytidine-3'-phosphate
  modified_base 16: mod_base = OTHER; note = guanosine-3'-phosphate
  modified_base 17: mod_base = OTHER; note = cytidine-3'-phosphate
  modified_base 18: mod_base = OTHER; note = adenosine-3'-phosphate
  modified_base 19: mod_base = OTHER; note = adenosine-3'-phosphate
  misc_feature 1..19: note = RNA
  misc_feature 20..21: note = DNA
ctgcaggaccggcccgcaatt

SEQ ID NO: 1430 - DNA, 21 bp, synthetic construct
  source 1..21: mol_type = other DNA
  modified_base 1: mod_base = OTHER; note = guanosine-3'-phosphate
  modified_base 2: mod_base = OTHER; note = guanosine-3'-phosphate
  modified_base 3: mod_base = OTHER; note = cytidine-3'-phosphate
  modified_base 4: mod_base = OTHER; note = cytidine-3'-phosphate
  modified_base 5: mod_base = OTHER; note = cytidine-3'-phosphate
  modified_base 6: mod_base = OTHER; note = guanosine-3'-phosphate
  modified_base 7: mod_base = OTHER; note = cytidine-3'-phosphate
  modified_base 8: mod_base = OTHER; note = adenosine-3'-phosphate
  modified_base 9: mod_base = OTHER; note = cytidine-3'-phosphate
  modified_base 10: mod_base = OTHER; note = cytidine-3'-phosphate
  modified_base 11: mod_base = OTHER; note = cytidine-3'-phosphate
  modified_base 12: mod_base = OTHER; note = guanosine-3'-phosphate
  modified_base 13: mod_base = OTHER; note = adenosine-3'-phosphate
  modified_base 14: mod_base = OTHER; note = guanosine-3'-phosphate
  modified_base 15: mod_base = OTHER; note = guanosine-3'-phosphate
  modified_base 16: mod_base = OTHER; note = adenosine-3'-phosphate
  modified_base 17: mod_base = OTHER; note = uridine-3'-phosphate
  modified_base 18: mod_base = OTHER; note = cytidine-3'-phosphate
  modified_base 19: mod_base = OTHER; note = uridine-3'-phosphate
  misc_feature 1..19: note = RNA
  misc_feature 20..21: note = DNA
ggcccgcacccgaggatcttt

SEQ ID NO: 1431 - DNA, 21 bp, synthetic construct
  source 1..21: mol_type = other DNA
  modified_base 1: mod_base = OTHER; note = cytidine-3'-phosphate
  modified_base 2: mod_base = OTHER; note = guanosine-3'-phosphate
  modified_base 3: mod_base = OTHER; note = adenosine-3'-phosphate
  modified_base 4: mod_base = OTHER; note = guanosine-3'-phosphate
  modified_base 5: mod_base = OTHER; note = guanosine-3'-phosphate
  modified_base 6: mod_base = OTHER; note = adenosine-3'-phosphate
  modified_base 7: mod_base = OTHER; note = uridine-3'-phosphate
  modified_base 8: mod_base = OTHER; note = cytidine-3'-phosphate
  modified_base 9: mod_base = OTHER; note = uridine-3'-phosphate
  modified_base 10: mod_base = OTHER; note = guanosine-3'-phosphate
  modified_base 11: mod_base = OTHER; note = adenosine-3'-phosphate
  modified_base 12: mod_base = OTHER; note = cytidine-3'-phosphate
  modified_base 13: mod_base = OTHER; note = guanosine-3'-phosphate
  modified_base 14: mod_base = OTHER; note = guanosine-3'-phosphate
  modified_base 15: mod_base = OTHER; note = uridine-3'-phosphate
  modified_base 16: mod_base = OTHER; note = guanosine-3'-phosphate
  modified_base 17: mod_base = OTHER; note = guanosine-3'-phosphate
  modified_base 18: mod_base = OTHER; note = uridine-3'-phosphate
  modified_base 19: mod_base = OTHER; note = adenosine-3'-phosphate
  misc_feature 1..19: note = RNA
  misc_feature 20..21: note = DNA
cgaggatctgacggtggtatt

SEQ ID NO: 1432 - DNA, 21 bp, synthetic construct
  source 1..21: mol_type = other DNA
  modified_base 1: mod_base = OTHER; note = guanosine-3'-phosphate
  modified_base 2: mod_base = OTHER; note = uridine-3'-phosphate
  modified_base 3: mod_base = OTHER; note = guanosine-3'-phosphate
  modified_base 4: mod_base = OTHER; note = guanosine-3'-phosphate
  modified_base 5: mod_base = OTHER; note = uridine-3'-phosphate
  modified_base 6: mod_base = OTHER; note = guanosine-3'-phosphate
  modified_base 7: mod_base = OTHER; note = cytidine-3'-phosphate
  modified_base 8: mod_base = OTHER; note = uridine-3'-phosphate
  modified_base 9: mod_base = OTHER; note = cytidine-3'-phosphate
  modified_base 10: mod_base = OTHER; note = guanosine-3'-phosphate
  modified_base 11: mod_base = OTHER; note = guanosine-3'-phosphate
  modified_base 12: mod_base = OTHER; note = cytidine-3'-phosphate
  modified_base 13: mod_base = OTHER; note = cytidine-3'-phosphate
  modified_base 14: mod_base = OTHER; note = adenosine-3'-phosphate
  modified_base 15: mod_base = OTHER; note = guanosine-3'-phosphate
  modified_base 16: mod_base = OTHER; note = guanosine-3'-phosphate
  modified_base 17: mod_base = OTHER; note = adenosine-3'-phosphate
  modified_base 18: mod_base = OTHER; note = adenosine-3'-phosphate
  modified_base 19: mod_base = OTHER; note = adenosine-3'-phosphate
  misc_feature 1..19: note = RNA
  misc_feature 20..21: note = DNA
gtggtgctcggccaggaaatt

SEQ ID NO: 1433 - DNA, 21 bp, synthetic construct
  source 1..21: mol_type = other DNA
  modified_base 1: mod_base = OTHER; note = guanosine-3'-phosphate
  modified_base 2: mod_base = OTHER; note = cytidine-3'-phosphate
  modified_base 3: mod_base = OTHER; note = cytidine-3'-phosphate
  modified_base 4: mod_base = OTHER; note = adenosine-3'-phosphate
  modified_base 5: mod_base = OTHER; note = guanosine-3'-phosphate
  modified_base 6: mod_base = OTHER; note = guanosine-3'-phosphate
  modified_base 7: mod_base = OTHER; note = adenosine-3'-phosphate
  modified_base 8: mod_base = OTHER; note = adenosine-3'-phosphate
  modified_base 9: mod_base = OTHER; note = cytidine-3'-phosphate
  modified_base 10: mod_base = OTHER; note = guanosine-3'-phosphate
  modified_base 11: mod_base = OTHER; note = cytidine-3'-phosphate
  modified_base 12: mod_base = OTHER; note = cytidine-3'-phosphate
  modified_base 13: mod_base = OTHER; note = guanosine-3'-phosphate
  modified_base 14: mod_base = OTHER; note = uridine-3'-phosphate
  modified_base 15: mod_base = OTHER; note = adenosine-3'-phosphate
  modified_base 16: mod_base = OTHER; note = adenosine-3'-phosphate
  modified_base 17: mod_base = OTHER; note = cytidine-3'-phosphate
  modified_base 18: mod_base = OTHER; note = cytidine-3'-phosphate
  modified_base 19: mod_base = OTHER; note = adenosine-3'-phosphate
  misc_feature 1..19: note = RNA
  misc_feature 20..21: note = DNA
gccaggaacgccgtaaccatt

SEQ ID NO: 1434 - DNA, 21 bp, synthetic construct
  source 1..21: mol_type = other DNA
  modified_base 1: mod_base = OTHER; note = cytidine-3'-phosphate
  modified_base 2: mod_base = OTHER; note = guanosine-3'-phosphate
  modified_base 3: mod_base = OTHER; note = uridine-3'-phosphate
  modified_base 4: mod_base = OTHER; note = adenosine-3'-phosphate
  modified_base 5: mod_base = OTHER; note = adenosine-3'-phosphate
  modified_base 6: mod_base = OTHER; note = cytidine-3'-phosphate
  modified_base 7: mod_base = OTHER; note = cytidine-3'-phosphate
  modified_base 8: mod_base = OTHER; note = adenosine-3'-phosphate
  modified_base 9: mod_base = OTHER; note = cytidine-3'-phosphate
  modified_base 10: mod_base = OTHER; note = adenosine-3'-phosphate
  modified_base 11: mod_base = OTHER; note = guanosine-3'-phosphate
  modified_base 12: mod_base = OTHER; note = cytidine-3'-phosphate
  modified_base 13: mod_base = OTHER; note = uridine-3'-phosphate
  modified_base 14: mod_base = OTHER; note = guanosine-3'-phosphate
  modified_base 15: mod_base = OTHER; note = uridine-3'-phosphate
  modified_base 16: mod_base = OTHER; note = guanosine-3'-phosphate
  modified_base 17: mod_base = OTHER; note = adenosine-3'-phosphate
  modified_base 18: mod_base = OTHER; note = guanosine-3'-phosphate
  modified_base 19: mod_base = OTHER; note = adenosine-3'-phosphate
  misc_feature 1..19: note = RNA
  misc_feature 20..21: note = DNA
cgtaaccacagctgtgagatt

SEQ ID NO: 1435 - DNA, 21 bp, synthetic construct
  source 1..21: mol_type = other DNA
  modified_base 1: mod_base = OTHER; note = uridine-3'-phosphate
  modified_base 2: mod_base = OTHER; note = guanosine-3'-phosphate
  modified_base 3: mod_base = OTHER; note = uridine-3'-phosphate
  modified_base 4: mod_base = OTHER; note = guanosine-3'-phosphate
  modified_base 5: mod_base = OTHER; note = adenosine-3'-phosphate
  modified_base 6: mod_base = OTHER; note = guanosine-3'-phosphate
  modified_base 7: mod_base = OTHER; note = cytidine-3'-phosphate
  modified_base 8: mod_base = OTHER; note = cytidine-3'-phosphate
  modified_base 9: mod_base = OTHER; note = guanosine-3'-phosphate
  modified_base 10: mod_base = OTHER; note = uridine-3'-phosphate
  modified_base 11: mod_base = OTHER; note = guanosine-3'-phosphate
  modified_base 12: mod_base = OTHER; note = cytidine-3'-phosphate
  modified_base 13: mod_base = OTHER; note = cytidine-3'-phosphate
  modified_base 14: mod_base = OTHER; note = adenosine-3'-phosphate
  modified_base 15: mod_base = OTHER; note = guanosine-3'-phosphate
  modified_base 16: mod_base = OTHER; note = adenosine-3'-phosphate
  modified_base 17: mod_base = OTHER; note = cytidine-3'-phosphate
  modified_base 18: mod_base = OTHER; note = guanosine-3'-phosphate
  modified_base 19: mod_base = OTHER; note = uridine-3'-phosphate
  misc_feature 1..19: note = RNA
  misc_feature 20..21: note = DNA
tgtgagccgtgccagacgttt

SEQ ID NO: 1436 - DNA, 21 bp, synthetic construct
  source 1..21: mol_type = other DNA
  modified_base 1: mod_base = OTHER; note = uridine-3'-phosphate
  modified_base 2: mod_base = OTHER; note = guanosine-3'-phosphate
  modified_base 3: mod_base = OTHER; note = cytidine-3'-phosphate
  modified_base 4: mod_base = OTHER; note = cytidine-3'-phosphate
  modified_base 5: mod_base = OTHER; note = adenosine-3'-phosphate
  modified_base 6: mod_base = OTHER; note = guanosine-3'-phosphate
  modified_base 7: mod_base = OTHER; note = adenosine-3'-phosphate
  modified_base 8: mod_base = OTHER; note = cytidine-3'-phosphate
  modified_base 9: mod_base = OTHER; note = guanosine-3'-phosphate
  modified_base 10: mod_base = OTHER; note = uridine-3'-phosphate
  modified_base 11: mod_base = OTHER; note = uridine-3'-phosphate
  modified_base 12: mod_base = OTHER; note = guanosine-3'-phosphate
  modified_base 13: mod_base = OTHER; note = guanosine-3'-phosphate
  modified_base 14: mod_base = OTHER; note = cytidine-3'-phosphate
  modified_base 15: mod_base = OTHER; note = cytidine-3'-phosphate
  modified_base 16: mod_base = OTHER; note = guanosine-3'-phosphate
  modified_base 17: mod_base = OTHER; note = uridine-3'-phosphate
  modified_base 18: mod_base = OTHER; note = guanosine-3'-phosphate
  modified_base 19: mod_base = OTHER; note = adenosine-3'-phosphate
  misc_feature 1..19: note = RNA
  misc_feature 20..21: note = DNA
tgccagacgttggccgtgatt

SEQ ID NO: 1437 - DNA, 21 bp, synthetic construct
  source 1..21: mol_type = other DNA
  modified_base 1: mod_base = OTHER; note = guanosine-3'-phosphate
  modified_base 2: mod_base = OTHER; note = cytidine-3'-phosphate
  modified_base 3: mod_base = OTHER; note = cytidine-3'-phosphate
  modified_base 4: mod_base = OTHER; note = guanosine-3'-phosphate
  modified_base 5: mod_base = OTHER; note = uridine-3'-phosphate
  modified_base 6: mod_base = OTHER; note = guanosine-3'-phosphate
  modified_base 7: mod_base = OTHER; note = cytidine-3'-phosphate
  modified_base 8: mod_base = OTHER; note = guanosine-3'-phosphate
  modified_base 9: mod_base = OTHER; note = cytidine-3'-phosphate
  modified_base 10: mod_base = OTHER; note = uridine-3'-phosphate
  modified_base 11: mod_base = OTHER; note = cytidine-3'-phosphate
  modified_base 12: mod_base = OTHER; note = cytidine-3'-phosphate
  modified_base 13: mod_base = OTHER; note = uridine-3'-phosphate
  modified_base 14: mod_base = OTHER; note = adenosine-3'-phosphate
  modified_base 15: mod_base = OTHER; note = cytidine-3'-phosphate
  modified_base 16: mod_base = OTHER; note = cytidine-3'-phosphate
  modified_base 17: mod_base = OTHER; note = guanosine-3'-phosphate
  modified_base 18: mod_base = OTHER; note = cytidine-3'-phosphate
  modified_base 19: mod_base = OTHER; note = uridine-3'-phosphate
  misc_feature 1..19: note = RNA
  misc_feature 20..21: note = DNA
gccgtgcgctcctaccgcttt

SEQ ID NO: 1438 - DNA, 21 bp, synthetic construct
  source 1..21: mol_type = other DNA
  modified_base 1: mod_base = OTHER; note = uridine-3'-phosphate
  modified_base 2: mod_base = OTHER; note = adenosine-3'-phosphate
  modified_base 3: mod_base = OTHER; note = cytidine-3'-phosphate
  modified_base 4: mod_base = OTHER; note = cytidine-3'-phosphate
  modified_base 5: mod_base = OTHER; note = guanosine-3'-phosphate
  modified_base 6: mod_base = OTHER; note = cytidine-3'-phosphate
  modified_base 7: mod_base = OTHER; note = uridine-3'-phosphate
  modified_base 8: mod_base = OTHER; note = uridine-3'-phosphate
  modified_base 9: mod_base = OTHER; note = guanosine-3'-phosphate
  modified_base 10: mod_base = OTHER; note = cytidine-3'-phosphate
  modified_base 11: mod_base = OTHER; note = adenosine-3'-phosphate
  modified_base 12: mod_base = OTHER; note = cytidine-3'-phosphate
  modified_base 13: mod_base = OTHER; note = guanosine-3'-phosphate
  modified_base 14: mod_base = OTHER; note = adenosine-3'-phosphate
  modified_base 15: mod_base = OTHER; note = guanosine-3'-phosphate
  modified_base 16: mod_base = OTHER; note = guanosine-3'-phosphate
  modified_base 17: mod_base = OTHER; note = cytidine-3'-phosphate
  modified_base 18: mod_base = OTHER; note = cytidine-3'-phosphate
  modified_base 19: mod_base = OTHER; note = uridine-3'-phosphate
  misc_feature 1..19: note = RNA
  misc_feature 20..21: note = DNA
taccgcttgcacgaggccttt

SEQ ID NO: 1439 - DNA, 21 bp, synthetic construct
  source 1..21: mol_type = other DNA
  modified_base 1: mod_base = OTHER; note = adenosine-3'-phosphate
  modified_base 2: mod_base = OTHER; note = cytidine-3'-phosphate
  modified_base 3: mod_base = OTHER; note = guanosine-3'-phosphate
  modified_base 4: mod_base = OTHER; note = adenosine-3'-phosphate
  modified_base 5: mod_base = OTHER; note = guanosine-3'-phosphate
  modified_base 6: mod_base = OTHER; note = guanosine-3'-phosphate
  modified_base 7: mod_base = OTHER; note = cytidine-3'-phosphate
  modified_base 8: mod_base = OTHER; note = cytidine-3'-phosphate
  modified_base 9: mod_base = OTHER; note = uridine-3'-phosphate
  modified_base 10: mod_base = OTHER; note = uridine-3'-phosphate
  modified_base 11: mod_base = OTHER; note = cytidine-3'-phosphate
  modified_base 12: mod_base = OTHER; note = uridine-3'-phosphate
  modified_base 13: mod_base = OTHER; note = cytidine-3'-phosphate
  modified_base 14: mod_base = OTHER; note = guanosine-3'-phosphate
  modified_base 15: mod_base = OTHER; note = cytidine-3'-phosphate
  modified_base 16: mod_base = OTHER; note = cytidine-3'-phosphate
  modified_base 17: mod_base = OTHER; note = cytidine-3'-phosphate
  modified_base 18: mod_base = OTHER; note = guanosine-3'-phosphate
  modified_base 19: mod_base = OTHER; note = uridine-3'-phosphate
  misc_feature 1..19: note = RNA
  misc_feature 20..21: note = DNA
acgaggccttctcgcccgttt

SEQ ID NO: 1440 - DNA, 21 bp, synthetic construct
  source 1..21: mol_type = other DNA
  modified_base 1: mod_base = OTHER; note = uridine-3'-phosphate
  modified_base 2: mod_base = OTHER; note = cytidine-3'-phosphate
  modified_base 3: mod_base = OTHER; note = guanosine-3'-phosphate
  modified_base 4: mod_base = OTHER; note = cytidine-3'-phosphate
  modified_base 5: mod_base = OTHER; note = cytidine-3'-phosphate
  modified_base 6: mod_base = OTHER; note = cytidine-3'-phosphate
  modified_base 7: mod_base = OTHER; note = guanosine-3'-phosphate
  modified_base 8: mod_base = OTHER; note = uridine-3'-phosphate
  modified_base 9: mod_base = OTHER; note = cytidine-3'-phosphate
  modified_base 10: mod_base = OTHER; note = adenosine-3'-phosphate
  modified_base 11: mod_base = OTHER; note = guanosine-3'-phosphate
  modified_base 12: mod_base = OTHER; note = cytidine-3'-phosphate
  modified_base 13: mod_base = OTHER; note = uridine-3'-phosphate
  modified_base 14: mod_base = OTHER; note = adenosine-3'-phosphate
  modified_base 15: mod_base = OTHER; note = cytidine-3'-phosphate
  modified_base 16: mod_base = OTHER; note = cytidine-3'-phosphate
  modified_base 17: mod_base = OTHER; note = adenosine-3'-phosphate
  modified_base 18: mod_base = OTHER; note = guanosine-3'-phosphate
  modified_base 19: mod_base = OTHER; note = adenosine-3'-phosphate
  misc_feature 1..19: note = RNA
  misc_feature 20..21: note = DNA
tcgcccgtcagctaccagatt

SEQ ID NO: 1441 - DNA, 21 bp, synthetic construct
  source 1..21: mol_type = other DNA
  modified_base 1: mod_base = OTHER; note = cytidine-3'-phosphate
  modified_base 2: mod_base = OTHER; note = uridine-3'-phosphate
  modified_base 3: mod_base = OTHER; note = adenosine-3'-phosphate
  modified_base 4: mod_base = OTHER; note = cytidine-3'-phosphate
  modified_base 5: mod_base = OTHER; note = cytidine-3'-phosphate
  modified_base 6: mod_base = OTHER; note = adenosine-3'-phosphate
  modified_base 7: mod_base = OTHER; note = guanosine-3'-phosphate
  modified_base 8: mod_base = OTHER; note = cytidine-3'-phosphate
  modified_base 9: mod_base = OTHER; note = adenosine-3'-phosphate
  modified_base 10: mod_base = OTHER; note = cytidine-3'-phosphate
  modified_base 11: mod_base = OTHER; note = guanosine-3'-phosphate
  modified_base 12: mod_base = OTHER; note = adenosine-3'-phosphate
  modified_base 13: mod_base = OTHER; note = cytidine-3'-phosphate
  modified_base 14: mod_base = OTHER; note = cytidine-3'-phosphate
  modified_base 15: mod_base = OTHER; note = uridine-3'-phosphate
  modified_base 16: mod_base = OTHER; note = guanosine-3'-phosphate
  modified_base 17: mod_base = OTHER; note = guanosine-3'-phosphate
  modified_base 18: mod_base = OTHER; note = cytidine-3'-phosphate
  modified_base 19: mod_base = OTHER; note = uridine-3'-phosphate
  misc_feature 1..19: note = RNA
  misc_feature 20..21: note = DNA
ctaccagcacgacctggcttt

SEQ ID NO: 1442 - DNA, 21 bp, synthetic construct
  source 1..21: mol_type = other DNA
  modified_base 1: mod_base = OTHER; note = adenosine-3'-phosphate
  modified_base 2: mod_base = OTHER; note = cytidine-3'-phosphate
  modified_base 3: mod_base = OTHER; note = cytidine-3'-phosphate
  modified_base 4: mod_base = OTHER; note = uridine-3'-phosphate
  modified_base 5: mod_base = OTHER; note = guanosine-3'-phosphate
  modified_base 6: mod_base = OTHER; note = guanosine-3'-phosphate
  modified_base 7: mod_base = OTHER; note = cytidine-3'-phosphate
  modified_base 8: mod_base = OTHER; note = uridine-3'-phosphate
  modified_base 9: mod_base = OTHER; note = cytidine-3'-phosphate
  modified_base 10: mod_base = OTHER; note = uridine-3'-phosphate
  modified_base 11: mod_base = OTHER; note = guanosine-3'-phosphate
  modified_base 12: mod_base = OTHER; note = uridine-3'-phosphate
  modified_base 13: mod_base = OTHER; note = uridine-3'-phosphate
  modified_base 14: mod_base = OTHER; note = guanosine-3'-phosphate
  modified_base 15: mod_base = OTHER; note = cytidine-3'-phosphate
  modified_base 16: mod_base = OTHER; note = guanosine-3'-phosphate
  modified_base 17: mod_base = OTHER; note = cytidine-3'-phosphate
  modified_base 18: mod_base = OTHER; note = cytidine-3'-phosphate
  modified_base 19: mod_base = OTHER; note = uridine-3'-phosphate
  misc_feature 1..19: note = RNA
  misc_feature 20..21: note = DNA
acctggctctgttgcgccttt

SEQ ID NO: 1443 - DNA, 21 bp, synthetic construct
  source 1..21: mol_type = other DNA
  modified_base 1: mod_base = OTHER; note = uridine-3'-phosphate
  modified_base 2: mod_base = OTHER; note = uridine-3'-phosphate
  modified_base 3: mod_base = OTHER; note = guanosine-3'-phosphate
  modified_base 4: mod_base = OTHER; note = cytidine-3'-phosphate
  modified_base 5: mod_base = OTHER; note = guanosine-3'-phosphate
  modified_base 6: mod_base = OTHER; note = cytidine-3'-phosphate
  modified_base 7: mod_base = OTHER; note = cytidine-3'-phosphate
  modified_base 8: mod_base = OTHER; note = uridine-3'-phosphate
  modified_base 9: mod_base = OTHER; note = uridine-3'-phosphate
  modified_base 10: mod_base = OTHER; note = cytidine-3'-phosphate
  modified_base 11: mod_base = OTHER; note = adenosine-3'-phosphate
  modified_base 12: mod_base = OTHER; note = guanosine-3'-phosphate
  modified_base 13: mod_base = OTHER; note = guanosine-3'-phosphate
  modified_base 14: mod_base = OTHER; note = adenosine-3'-phosphate
  modified_base 15: mod_base = OTHER; note = guanosine-3'-phosphate
  modified_base 16: mod_base = OTHER; note = guanosine-3'-phosphate
  modified_base 17: mod_base = OTHER; note = adenosine-3'-phosphate
  modified_base 18: mod_base = OTHER; note = uridine-3'-phosphate
  modified_base 19: mod_base = OTHER; note = adenosine-3'-phosphate
  misc_feature 1..19: note = RNA
  misc_feature 20..21: note = DNA
ttgcgccttcaggaggatatt

SEQ ID NO: 1444 - DNA, 21 bp, synthetic construct
  source 1..21: mol_type = other DNA
  modified_base 1: mod_base = OTHER; note = guanosine-3'-phosphate
  modified_base 2: mod_base = OTHER; note = adenosine-3'-phosphate
  modified_base 3: mod_base = OTHER; note = guanosine-3'-phosphate
  modified_base 4: mod_base = OTHER; note = guanosine-3'-phosphate
  modified_base 5: mod_base = OTHER; note = adenosine-3'-phosphate
  modified_base 6: mod_base = OTHER; note = uridine-3'-phosphate
  modified_base 7: mod_base = OTHER; note = guanosine-3'-phosphate
  modified_base 8: mod_base = OTHER; note = cytidine-3'-phosphate
  modified_base 9: mod_base = OTHER; note = guanosine-3'-phosphate
  modified_base 10: mod_base = OTHER; note = guanosine-3'-phosphate
  modified_base 11: mod_base = OTHER; note = adenosine-3'-phosphate
  modified_base 12: mod_base = OTHER; note = cytidine-3'-phosphate
  modified_base 13: mod_base = OTHER; note = guanosine-3'-phosphate
  modified_base 14: mod_base = OTHER; note = guanosine-3'-phosphate
  modified_base 15: mod_base = OTHER; note = cytidine-3'-phosphate
  modified_base 16: mod_base = OTHER; note = adenosine-3'-phosphate
  modified_base 17: mod_base = OTHER; note = guanosine-3'-phosphate
  modified_base 18: mod_base = OTHER; note = cytidine-3'-phosphate
  modified_base 19: mod_base = OTHER; note = uridine-3'-phosphate
  misc_feature 1..19: note = RNA
  misc_feature 20..21: note = DNA
gaggatgcggacggcagcttt

SEQ ID NO: 1445 - DNA, 21 bp, synthetic construct
  source 1..21: mol_type = other DNA
  modified_base 1: mod_base = OTHER; note = adenosine-3'-phosphate
  modified_base 2: mod_base = OTHER; note = cytidine-3'-phosphate
  modified_base 3: mod_base = OTHER; note = guanosine-3'-phosphate
  modified_base 4: mod_base = OTHER; note = guanosine-3'-phosphate
  modified_base 5: mod_base = OTHER; note = cytidine-3'-phosphate
  modified_base 6: mod_base = OTHER; note = adenosine-3'-phosphate
  modified_base 7: mod_base = OTHER; note = guanosine-3'-phosphate
  modified_base 8: mod_base = OTHER; note = cytidine-3'-phosphate
  modified_base 9: mod_base = OTHER; note = uridine-3'-phosphate
  modified_base 10: mod_base = OTHER; note = guanosine-3'-phosphate
  modified_base 11: mod_base = OTHER; note = cytidine-3'-phosphate
  modified_base 12: mod_base = OTHER; note = guanosine-3'-phosphate
  modified_base 13: mod_base = OTHER; note = cytidine-3'-phosphate
  modified_base 14: mod_base = OTHER; note = guanosine-3'-phosphate
  modified_base 15: mod_base = OTHER; note = cytidine-3'-phosphate
  modified_base 16: mod_base = OTHER; note = uridine-3'-phosphate
  modified_base 17: mod_base = OTHER; note = cytidine-3'-phosphate
  modified_base 18: mod_base = OTHER; note = cytidine-3'-phosphate
  modified_base 19: mod_base = OTHER; note = uridine-3'-phosphate
  misc_feature 1..19: note = RNA
  misc_feature 20..21: note = DNA
acggcagctgcgcgctccttt

SEQ ID NO: 1446 - DNA, 21 bp, synthetic construct
  source 1..21: mol_type = other DNA
  modified_base 1: mod_base = OTHER; note = cytidine-3'-phosphate
  modified_base 2: mod_base = OTHER; note = guanosine-3'-phosphate
  modified_base 3: mod_base = OTHER; note = cytidine-3'-phosphate
  modified_base 4: mod_base = OTHER; note = uridine-3'-phosphate
  modified_base 5: mod_base = OTHER; note = cytidine-3'-phosphate
  modified_base 6: mod_base = OTHER; note = cytidine-3'-phosphate
  modified_base 7: mod_base = OTHER; note = uridine-3'-phosphate
  modified_base 8: mod_base = OTHER; note = guanosine-3'-phosphate
  modified_base 9: mod_base = OTHER; note = uridine-3'-phosphate
  modified_base 10: mod_base = OTHER; note = cytidine-3'-phosphate
  modified_base 11: mod_base = OTHER; note = guanosine-3'-phosphate
  modified_base 12: mod_base = OTHER; note = cytidine-3'-phosphate
  modified_base 13: mod_base = OTHER; note = cytidine-3'-phosphate
  modified_base 14: mod_base = OTHER; note = uridine-3'-phosphate
  modified_base 15: mod_base = OTHER; note = uridine-3'-phosphate
  modified_base 16: mod_base = OTHER; note = adenosine-3'-phosphate
  modified_base 17: mod_base = OTHER; note = cytidine-3'-phosphate
  modified_base 18: mod_base = OTHER; note = guanosine-3'-phosphate
  modified_base 19: mod_base = OTHER; note = uridine-3'-phosphate
  misc_feature 1..19: note = RNA
  misc_feature 20..21: note = DNA
cgctcctgtcgccttacgttt

SEQ ID NO: 1447 - DNA, 21 bp, synthetic construct
  source 1..21: mol_type = other DNA
  modified_base 1: mod_base = OTHER; note = cytidine-3'-phosphate
  modified_base 2: mod_base = OTHER; note = cytidine-3'-phosphate
  modified_base 3: mod_base = OTHER; note = uridine-3'-phosphate
  modified_base 4: mod_base = OTHER; note = uridine-3'-phosphate
  modified_base 5: mod_base = OTHER; note = adenosine-3'-phosphate
  modified_base 6: mod_base = OTHER; note = cytidine-3'-phosphate
  modified_base 7: mod_base = OTHER; note = guanosine-3'-phosphate
  modified_base 8: mod_base = OTHER; note = uridine-3'-phosphate
  modified_base 9: mod_base = OTHER; note = uridine-3'-phosphate
  modified_base 10: mod_base = OTHER; note = cytidine-3'-phosphate
  modified_base 11: mod_base = OTHER; note = adenosine-3'-phosphate
  modified_base 12: mod_base = OTHER; note = guanosine-3'-phosphate
  modified_base 13: mod_base = OTHER; note = cytidine-3'-phosphate
  modified_base 14: mod_base = OTHER; note = cytidine-3'-phosphate
  modified_base 15: mod_base = OTHER; note = guanosine-3'-phosphate
  modified_base 16: mod_base = OTHER; note = guanosine-3'-phosphate
  modified_base 17: mod_base = OTHER; note = uridine-3'-phosphate
  modified_base 18: mod_base = OTHER; note = guanosine-3'-phosphate
  modified_base 19: mod_base = OTHER; note = uridine-3'-phosphate
  misc_feature 1..19: note = RNA
  misc_feature 20..21: note = DNA
ccttacgttcagccggtgttt

SEQ ID NO: 1448 - DNA, 21 bp, synthetic construct
  source 1..21: mol_type = other DNA
  modified_base 1: mod_base = OTHER; note = adenosine-3'-phosphate
  modified_base 2: mod_base = OTHER; note = guanosine-3'-phosphate
  modified_base 3: mod_base = OTHER; note = cytidine-3'-phosphate
  modified_base 4: mod_base = OTHER; note = cytidine-3'-phosphate
  modified_base 5: mod_base = OTHER; note = guanosine-3'-phosphate
  modified_base 6: mod_base = OTHER; note = guanosine-3'-phosphate
  modified_base 7: mod_base = OTHER; note = uridine-3'-phosphate
  modified_base 8: mod_base = OTHER; note = guanosine-3'-phosphate
  modified_base 9: mod_base = OTHER; note = uridine-3'-phosphate
  modified_base 10: mod_base = OTHER; note = guanosine-3'-phosphate
  modified_base 11: mod_base = OTHER; note = cytidine-3'-phosphate
  modified_base 12: mod_base = OTHER; note = cytidine-3'-phosphate
  modified_base 13: mod_base = OTHER; note = uridine-3'-phosphate
  modified_base 14: mod_base = OTHER; note = guanosine-3'-phosphate
  modified_base 15: mod_base = OTHER; note = cytidine-3'-phosphate
  modified_base 16: mod_base = OTHER; note = cytidine-3'-phosphate
  modified_base 17: mod_base = OTHER; note = adenosine-3'-phosphate
  modified_base 18: mod_base = OTHER; note = adenosine-3'-phosphate
  modified_base 19: mod_base = OTHER; note = adenosine-3'-phosphate
  misc_feature 1..19: note = RNA
  misc_feature 20..21: note = DNA
agccggtgtgcctgccaaatt

SEQ ID NO: 1449 - DNA, 21 bp, synthetic construct
  source 1..21: mol_type = other DNA
  modified_base 1: mod_base = OTHER; note = uridine-3'-phosphate
  modified_base 2: mod_base = OTHER; note = guanosine-3'-phosphate
  modified_base 3: mod_base = OTHER; note = cytidine-3'-phosphate
  modified_base 4: mod_base = OTHER; note = cytidine-3'-phosphate
  modified_base 5: mod_base = OTHER; note = adenosine-3'-phosphate
  modified_base 6: mod_base = OTHER; note = adenosine-3'-phosphate
  modified_base 7: mod_base = OTHER; note = guanosine-3'-phosphate
  modified_base 8: mod_base = OTHER; note = cytidine-3'-phosphate
  modified_base 9: mod_base = OTHER; note = guanosine-3'-phosphate
  modified_base 10: mod_base = OTHER; note = guanosine-3'-phosphate
  modified_base 11: mod_base = OTHER; note = cytidine-3'-phosphate
  modified_base 12: mod_base = OTHER; note = guanosine-3'-phosphate
  modified_base 13: mod_base = OTHER; note = cytidine-3'-phosphate
  modified_base 14: mod_base = OTHER; note = cytidine-3'-phosphate
  modified_base 15: mod_base = OTHER; note = guanosine-3'-phosphate
  modified_base 16: mod_base = OTHER; note = cytidine-3'-phosphate
  modified_base 17: mod_base = OTHER; note = guanosine-3'-phosphate
  modified_base 18: mod_base = OTHER; note = cytidine-3'-phosphate
  modified_base 19: mod_base = OTHER; note = adenosine-3'-phosphate
  misc_feature 1..19: note = RNA
  misc_feature 20..21: note = DNA
tgccaagcggcgccgcgcatt

SEQ ID NO: 1450 - DNA, 21 bp, synthetic construct
  source 1..21: mol_type = other DNA
  modified_base 1: mod_base = OTHER; note = guanosine-3'-phosphate
  modified_base 2: mod_base = OTHER; note = cytidine-3'-phosphate
  modified_base 3: mod_base = OTHER; note = guanosine-3'-phosphate
  modified_base 4: mod_base = OTHER; note = cytidine-3'-phosphate
  modified_base 5: mod_base = OTHER; note = cytidine-3'-phosphate
  modified_base 6: mod_base = OTHER; note = guanosine-3'-phosphate
  modified_base 7: mod_base = OTHER; note = cytidine-3'-phosphate
  modified_base 8: mod_base = OTHER; note = guanosine-3'-phosphate
  modified_base 9: mod_base = OTHER; note = cytidine-3'-phosphate
  modified_base 10: mod_base = OTHER; note = guanosine-3'-phosphate
  modified_base 11: mod_base = OTHER; note = adenosine-3'-phosphate
  modified_base 12: mod_base = OTHER; note = cytidine-3'-phosphate
  modified_base 13: mod_base = OTHER; note = cytidine-3'-phosphate
  modified_base 14: mod_base = OTHER; note = cytidine-3'-phosphate
  modified_base 15: mod_base = OTHER; note = uridine-3'-phosphate
  modified_base 16: mod_base = OTHER; note = cytidine-3'-phosphate
  modified_base 17: mod_base = OTHER; note = cytidine-3'-phosphate
  modified_base 18: mod_base = OTHER; note = guanosine-3'-phosphate
  modified_base 19: mod_base = OTHER; note = adenosine-3'-phosphate
  misc_feature 1..19: note = RNA
  misc_feature 20..21: note = DNA
gcgccgcgcgaccctccgatt

SEQ ID NO: 1451 - DNA, 21 bp, synthetic construct
  source 1..21: mol_type = other DNA
  modified_base 1: mod_base = OTHER; note = cytidine-3'-phosphate
  modified_base 2: mod_base = OTHER; note = cytidine-3'-phosphate
  modified_base 3: mod_base = OTHER; note = cytidine-3'-phosphate
  modified_base 4: mod_base = OTHER; note = uridine-3'-phosphate
  modified_base 5: mod_base = OTHER; note = cytidine-3'-phosphate
  modified_base 6: mod_base = OTHER; note = cytidine-3'-phosphate
  modified_base 7: mod_base = OTHER; note = guanosine-3'-phosphate
  modified_base 8: mod_base = OTHER; note = adenosine-3'-phosphate
  modified_base 9: mod_base = OTHER; note = guanosine-3'-phosphate
  modified_base 10: mod_base = OTHER; note = adenosine-3'-phosphate
  modified_base 11: mod_base = OTHER; note = cytidine-3'-phosphate
  modified_base 12: mod_base = OTHER; note = cytidine-3'-phosphate
  modified_base 13: mod_base = OTHER; note = adenosine-3'-phosphate
  modified_base 14: mod_base = OTHER; note = cytidine-3'-phosphate
  modified_base 15: mod_base = OTHER; note = guanosine-3'-phosphate
  modified_base 16: mod_base = OTHER; note = cytidine-3'-phosphate
  modified_base 17: mod_base = OTHER; note = uridine-3'-phosphate
  modified_base 18: mod_base = OTHER; note = cytidine-3'-phosphate
  modified_base 19: mod_base = OTHER; note = uridine-3'-phosphate
  misc_feature 1..19: note = RNA
  misc_feature 20..21: note = DNA
ccctccgagaccacgctcttt

SEQ ID NO: 1452 - DNA, 21 bp, synthetic construct
  source 1..21: mol_type = other DNA
  modified_base 1: mod_base = OTHER; note = cytidine-3'-phosphate
  modified_base 2: mod_base = OTHER; note = guanosine-3'-phosphate
  modified_base 3: mod_base = OTHER; note = cytidine-3'-phosphate
  modified_base 4: mod_base = OTHER; note = uridine-3'-phosphate
  modified_base 5: mod_base = OTHER; note = cytidine-3'-phosphate
  modified_base 6: mod_base = OTHER; note = uridine-3'-phosphate
  modified_base 7: mod_base = OTHER; note = guanosine-3'-phosphate
  modified_base 8: mod_base = OTHER; note = cytidine-3'-phosphate
  modified_base 9: mod_base = OTHER; note = cytidine-3'-phosphate
  modified_base 10: mod_base = OTHER; note = adenosine-3'-phosphate
  modified_base 11: mod_base = OTHER; note = guanosine-3'-phosphate
  modified_base 12: mod_base = OTHER; note = guanosine-3'-phosphate
  modified_base 13: mod_base = OTHER; note = uridine-3'-phosphate
  modified_base 14: mod_base = OTHER; note = guanosine-3'-phosphate
  modified_base 15: mod_base = OTHER; note = guanosine-3'-phosphate
  modified_base 16: mod_base = OTHER; note = cytidine-3'-phosphate
  modified_base 17: mod_base = OTHER; note = cytidine-3'-phosphate
  modified_base 18: mod_base = OTHER; note = guanosine-3'-phosphate
  modified_base 19: mod_base = OTHER; note = adenosine-3'-phosphate
  misc_feature 1..19: note = RNA
  misc_feature 20..21: note = DNA
cgctctgccaggtggccgatt

SEQ ID NO: 1453 - DNA, 21 bp, synthetic construct
  source 1..21: mol_type = other DNA
  modified_base 1: mod_base = OTHER; note = adenosine-3'-phosphate
  modified_base 2: mod_base = OTHER; note = guanosine-3'-phosphate
  modified_base 3: mod_base = OTHER; note = guanosine-3'-phosphate
  modified_base 4: mod_base = OTHER; note = uridine-3'-phosphate
  modified_base 5: mod_base = OTHER; note = guanosine-3'-phosphate
  modified_base 6: mod_base = OTHER; note = guanosine-3'-phosphate
  modified_base 7: mod_base = OTHER; note = cytidine-3'-phosphate
  modified_base 8: mod_base = OTHER; note = cytidine-3'-phosphate
  modified_base 9: mod_base = OTHER; note = guanosine-3'-phosphate
  modified_base 10: mod_base = OTHER; note = guanosine-3'-phosphate
  modified_base 11: mod_base = OTHER; note = cytidine-3'-phosphate
  modified_base 12: mod_base = OTHER; note = uridine-3'-phosphate
  modified_base 13: mod_base = OTHER; note = guanosine-3'-phosphate
  modified_base 14: mod_base = OTHER; note = guanosine-3'-phosphate
  modified_base 15: mod_base = OTHER; note = guanosine-3'-phosphate
  modified_base 16: mod_base = OTHER; note = guanosine-3'-phosphate
  modified_base 17: mod_base = OTHER; note = cytidine-3'-phosphate
  modified_base 18: mod_base = OTHER; note = cytidine-3'-phosphate
  modified_base 19: mod_base = OTHER; note = adenosine-3'-phosphate
  misc_feature 1..19: note = RNA
  misc_feature 20..21: note = DNA
aggtggccggctggggccatt

SEQ ID NO: 1454 - DNA, 21 bp, synthetic construct
  source 1..21: mol_type = other DNA
  modified_base 1: mod_base = OTHER; note = uridine-3'-phosphate
  modified_base 2: mod_base = OTHER; note = guanosine-3'-phosphate
  modified_base 3: mod_base = OTHER; note = guanosine-3'-phosphate
  modified_base 4: mod_base = OTHER; note = guanosine-3'-phosphate
  modified_base 5: mod_base = OTHER; note = guanosine-3'-phosphate
  modified_base 6: mod_base = OTHER; note = cytidine-3'-phosphate
  modified_base 7: mod_base = OTHER; note = cytidine-3'-phosphate
  modified_base 8: mod_base = OTHER; note = adenosine-3'-phosphate
  modified_base 9: mod_base = OTHER; note = cytidine-3'-phosphate
  modified_base 10: mod_base = OTHER; note = cytidine-3'-phosphate
  modified_base 11: mod_base = OTHER; note = adenosine-3'-phosphate
  modified_base 12: mod_base = OTHER; note = guanosine-3'-phosphate
  modified_base 13: mod_base = OTHER; note = uridine-3'-phosphate
  modified_base 14: mod_base = OTHER; note = uridine-3'-phosphate
  modified_base 15: mod_base = OTHER; note = cytidine-3'-phosphate
  modified_base 16: mod_base = OTHER; note = guanosine-3'-phosphate
  modified_base 17: mod_base = OTHER; note = adenosine-3'-phosphate
  modified_base 18: mod_base = OTHER; note = guanosine-3'-phosphate
  modified_base 19: mod_base = OTHER; note = adenosine-3'-phosphate
  misc_feature 1..19: note = RNA
  misc_feature 20..21: note = DNA
tggggccaccagttcgagatt

SEQ ID NO: 1455 - DNA, 21 bp, synthetic construct
  source 1..21: mol_type = other DNA
  modified_base 1: mod_base = OTHER; note = uridine-3'-phosphate
  modified_base 2: mod_base = OTHER; note = uridine-3'-phosphate
  modified_base 3: mod_base = OTHER; note = cytidine-3'-phosphate
  modified_base 4: mod_base = OTHER; note = guanosine-3'-phosphate
  modified_base 5: mod_base = OTHER; note = adenosine-3'-phosphate
  modified_base 6: mod_base = OTHER; note = guanosine-3'-phosphate
  modified_base 7: mod_base = OTHER; note = guanosine-3'-phosphate
  modified_base 8: mod_base = OTHER; note = guanosine-3'-phosphate
  modified_base 9: mod_base = OTHER; note = guanosine-3'-phosphate
  modified_base 10: mod_base = OTHER; note = guanosine-3'-phosphate
  modified_base 11: mod_base = OTHER; note = cytidine-3'-phosphate
  modified_base 12: mod_base = OTHER; note = guanosine-3'-phosphate
  modified_base 13: mod_base = OTHER; note = guanosine-3'-phosphate
  modified_base 14: mod_base = OTHER; note = adenosine-3'-phosphate
  modified_base 15: mod_base = OTHER; note = guanosine-3'-phosphate
  modified_base 16: mod_base = OTHER; note = guanosine-3'-phosphate
  modified_base 17: mod_base = OTHER; note = adenosine-3'-phosphate
  modified_base 18: mod_base = OTHER; note = adenosine-3'-phosphate
  modified_base 19: mod_base = OTHER; note = uridine-3'-phosphate
  misc_feature 1..19: note = RNA
  misc_feature 20..21: note = DNA
ttcgagggggcggaggaattt

SEQ ID NO: 1456 - DNA, 21 bp, synthetic construct
  source 1..21: mol_type = other DNA
  modified_base 1: mod_base = OTHER; note = cytidine-3'-phosphate
  modified_base 2: mod_base = OTHER; note = guanosine-3'-phosphate
  modified_base 3: mod_base = OTHER; note = guanosine-3'-phosphate
  modified_base 4: mod_base = OTHER; note = adenosine-3'-phosphate
  modified_base 5: mod_base = OTHER; note = guanosine-3'-phosphate
  modified_base 6: mod_base = OTHER; note = guanosine-3'-phosphate
  modified_base 7: mod_base = OTHER; note = adenosine-3'-phosphate
  modified_base 8: mod_base = OTHER; note = adenosine-3'-phosphate
  modified_base 9: mod_base = OTHER; note = uridine-3'-phosphate
  modified_base 10: mod_base = OTHER; note = adenosine-3'-phosphate
  modified_base 11: mod_base = OTHER; note = uridine-3'-phosphate
  modified_base 12: mod_base = OTHER; note = guanosine-3'-phosphate
  modified_base 13: mod_base = OTHER; note = cytidine-3'-phosphate
  modified_base 14: mod_base = OTHER; note = cytidine-3'-phosphate
  modified_base 15: mod_base = OTHER; note = adenosine-3'-phosphate
  modified_base 16: mod_base = OTHER; note = guanosine-3'-phosphate
  modified_base 17: mod_base = OTHER; note = cytidine-3'-phosphate
  modified_base 18: mod_base = OTHER; note = uridine-3'-phosphate
  modified_base 19: mod_base = OTHER; note = uridine-3'-phosphate
  misc_feature 1..19: note = RNA
  misc_feature 20..21: note = DNA
cggaggaatatgccagctttt

SEQ ID NO: 1457 - DNA, 21 bp, synthetic construct
  source 1..21: mol_type = other DNA
  modified_base 1: mod_base = OTHER; note = cytidine-3'-phosphate
  modified_base 2: mod_base = OTHER; note = adenosine-3'-phosphate
  modified_base 3: mod_base = OTHER; note = guanosine-3'-phosphate
  modified_base 4: mod_base = OTHER; note = cytidine-3'-phosphate
  modified_base 5: mod_base = OTHER; note = uridine-3'-phosphate
  modified_base 6: mod_base = OTHER; note = uridine-3'-phosphate
  modified_base 7: mod_base = OTHER; note = cytidine-3'-phosphate
  modified_base 8: mod_base = OTHER; note = cytidine-3'-phosphate
  modified_base 9: mod_base = OTHER; note = uridine-3'-phosphate
  modified_base 10: mod_base = OTHER; note = guanosine-3'-phosphate
  modified_base 11: mod_base = OTHER; note = cytidine-3'-phosphate
  modified_base 12: mod_base = OTHER; note = adenosine-3'-phosphate
  modified_base 13: mod_base = OTHER; note = guanosine-3'-phosphate
  modified_base 14: mod_base = OTHER; note = guanosine-3'-phosphate
  modified_base 15: mod_base = OTHER; note = adenosine-3'-phosphate
  modified_base 16: mod_base = OTHER; note = guanosine-3'-phosphate
  modified_base 17: mod_base = OTHER; note = guanosine-3'-phosphate
  modified_base 18: mod_base = OTHER; note = cytidine-3'-phosphate
  modified_base 19: mod_base = OTHER; note = adenosine-3'-phosphate
  misc_feature 1..19: note = RNA
  misc_feature 20..21: note = DNA
cagcttcctgcaggaggcatt

SEQ ID NO: 1458 - DNA, 21 bp, synthetic construct
  source 1..21: mol_type = other DNA
  modified_base 1: mod_base = OTHER; note = adenosine-3'-phosphate
  modified_base 2: mod_base = OTHER; note = guanosine-3'-phosphate
  modified_base 3: mod_base = OTHER; note = guanosine-3'-phosphate
  modified_base 4: mod_base = OTHER; note = adenosine-3'-phosphate
  modified_base 5: mod_base = OTHER; note = guanosine-3'-phosphate
  modified_base 6: mod_base = OTHER; note = guanosine-3'-phosphate
  modified_base 7: mod_base = OTHER; note = cytidine-3'-phosphate
  modified_base 8: mod_base = OTHER; note = guanosine-3'-phosphate
  modified_base 9: mod_base = OTHER; note = cytidine-3'-phosphate
  modified_base 10: mod_base = OTHER; note = adenosine-3'-phosphate
  modified_base 11: mod_base = OTHER; note = guanosine-3'-phosphate
  modified_base 12: mod_base = OTHER; note = guanosine-3'-phosphate
  modified_base 13: mod_base = OTHER; note = uridine-3'-phosphate
  modified_base 14: mod_base = OTHER; note = adenosine-3'-phosphate
  modified_base 15: mod_base = OTHER; note = cytidine-3'-phosphate
  modified_base 16: mod_base = OTHER; note = cytidine-3'-phosphate
  modified_base 17: mod_base = OTHER; note = guanosine-3'-phosphate
  modified_base 18: mod_base = OTHER; note = uridine-3'-phosphate
  modified_base 19: mod_base = OTHER; note = uridine-3'-phosphate
  misc_feature 1..19: note = RNA
  misc_feature 20..21: note = DNA
aggaggcgcaggtaccgtttt

SEQ ID NO: 1459 - DNA, 21 bp, synthetic construct
  source 1..21: mol_type = other DNA
  modified_base 1: mod_base = OTHER; note = adenosine-3'-phosphate
  modified_base 2: mod_base = OTHER; note = guanosine-3'-phosphate
  modified_base 3: mod_base = OTHER; note = guanosine-3'-phosphate
  modified_base 4: mod_base = OTHER; note = uridine-3'-phosphate
  modified_base 5: mod_base = OTHER; note = adenosine-3'-phosphate
  modified_base 6: mod_base = OTHER; note = cytidine-3'-phosphate
  modified_base 7: mod_base = OTHER; note = cytidine-3'-phosphate
  modified_base 8: mod_base = OTHER; note = guanosine-3'-phosphate
  modified_base 9: mod_base = OTHER; note = uridine-3'-phosphate
  modified_base 10: mod_base = OTHER; note = uridine-3'-phosphate
  modified_base 11: mod_base = OTHER; note = cytidine-3'-phosphate
  modified_base 12: mod_base = OTHER; note = cytidine-3'-phosphate
  modified_base 13: mod_base = OTHER; note = uridine-3'-phosphate
  modified_base 14: mod_base = OTHER; note = cytidine-3'-phosphate
  modified_base 15: mod_base = OTHER; note = uridine-3'-phosphate
  modified_base 16: mod_base = OTHER; note = cytidine-3'-phosphate
  modified_base 17: mod_base = OTHER; note = cytidine-3'-phosphate
  modified_base 18: mod_base = OTHER; note = cytidine-3'-phosphate
  modified_base 19: mod_base = OTHER; note = uridine-3'-phosphate
  misc_feature 1..19: note = RNA
  misc_feature 20..21: note = DNA
aggtaccgttcctctcccttt

SEQ ID NO: 1460 - DNA, 21 bp, synthetic construct
  source 1..21: mol_type = other DNA
  modified_base 1: mod_base = OTHER; note = cytidine-3'-phosphate
  modified_base 2: mod_base = OTHER; note = uridine-3'-phosphate
  modified_base 3: mod_base = OTHER; note = cytidine-3'-phosphate
  modified_base 4: mod_base = OTHER; note = uridine-3'-phosphate
  modified_base 5: mod_base = OTHER; note = cytidine-3'-phosphate
  modified_base 6: mod_base = OTHER; note = cytidine-3'-phosphate
  modified_base 7: mod_base = OTHER; note = cytidine-3'-phosphate
  modified_base 8: mod_base = OTHER; note = uridine-3'-phosphate
  modified_base 9: mod_base = OTHER; note = guanosine-3'-phosphate
  modified_base 10: mod_base = OTHER; note = guanosine-3'-phosphate
  modified_base 11: mod_base = OTHER; note = adenosine-3'-phosphate
  modified_base 12: mod_base = OTHER; note = guanosine-3'-phosphate
  modified_base 13: mod_base = OTHER; note = cytidine-3'-phosphate
  modified_base 14: mod_base = OTHER; note = guanosine-3'-phosphate
  modified_base 15: mod_base = OTHER; note = cytidine-3'-phosphate
  modified_base 16: mod_base = OTHER; note = uridine-3'-phosphate
  modified_base 17: mod_base = OTHER; note = guanosine-3'-phosphate
  modified_base 18: mod_base = OTHER; note = cytidine-3'-phosphate
  modified_base 19: mod_base = OTHER; note = uridine-3'-phosphate
  misc_feature 1..19: note = RNA
  misc_feature 20..21: note = DNA
ctctccctggagcgctgcttt

SEQ ID NO: 1461 - DNA, 21 bp, synthetic construct
  source 1..21: mol_type = other DNA
  modified_base 1: mod_base = OTHER; note = cytidine-3'-phosphate
  modified_base 2: mod_base = OTHER; note = guanosine-3'-phosphate
  modified_base 3: mod_base = OTHER; note = cytidine-3'-phosphate
  modified_base 4: mod_base = OTHER; note = uridine-3'-phosphate
  modified_base 5: mod_base = OTHER; note = guanosine-3'-phosphate
  modified_base 6: mod_base = OTHER; note = cytidine-3'-phosphate
  modified_base 7: mod_base = OTHER; note = uridine-3'-phosphate
  modified_base 8: mod_base = OTHER; note = cytidine-3'-phosphate
  modified_base 9: mod_base = OTHER; note = adenosine-3'-phosphate
  modified_base 10: mod_base = OTHER; note = guanosine-3'-phosphate
  modified_base 11: mod_base = OTHER; note = cytidine-3'-phosphate
  modified_base 12: mod_base = OTHER; note = cytidine-3'-phosphate
  modified_base 13: mod_base = OTHER; note = cytidine-3'-phosphate
  modified_base 14: mod_base = OTHER; note = cytidine-3'-phosphate
  modified_base 15: mod_base = OTHER; note = guanosine-3'-phosphate
  modified_base 16: mod_base = OTHER; note = guanosine-3'-phosphate
  modified_base 17: mod_base = OTHER; note = adenosine-3'-phosphate
  modified_base 18: mod_base = OTHER; note = cytidine-3'-phosphate
  modified_base 19: mod_base = OTHER; note = adenosine-3'-phosphate
  misc_feature 1..19: note = RNA
  misc_feature 20..21: note = DNA
cgctgctcagccccggacatt

SEQ ID NO: 1462 - DNA, 21 bp, synthetic construct
  source 1..21: mol_type = other DNA
  modified_base 1: mod_base = OTHER; note = cytidine-3'-phosphate
  modified_base 2: mod_base = OTHER; note = cytidine-3'-phosphate
  modified_base 3: mod_base = OTHER; note = guanosine-3'-phosphate
  modified_base 4: mod_base = OTHER; note = guanosine-3'-phosphate
  modified_base 5: mod_base = OTHER; note = adenosine-3'-phosphate
  modified_base 6: mod_base = OTHER; note = cytidine-3'-phosphate
  modified_base 7: mod_base = OTHER; note = guanosine-3'-phosphate
  modified_base 8: mod_base = OTHER; note = uridine-3'-phosphate
  modified_base 9: mod_base = OTHER; note = guanosine-3'-phosphate
  modified_base 10: mod_base = OTHER; note = cytidine-3'-phosphate
  modified_base 11: mod_base = OTHER; note = adenosine-3'-phosphate
  modified_base 12: mod_base = OTHER; note = cytidine-3'-phosphate
  modified_base 13: mod_base = OTHER; note = guanosine-3'-phosphate
  modified_base 14: mod_base = OTHER; note = guanosine-3'-phosphate
  modified_base 15: mod_base = OTHER; note = adenosine-3'-phosphate
  modified_base 16: mod_base = OTHER; note = uridine-3'-phosphate
  modified_base 17: mod_base = OTHER; note = cytidine-3'-phosphate
  modified_base 18: mod_base = OTHER; note = cytidine-3'-phosphate
  modified_base 19: mod_base = OTHER; note = uridine-3'-phosphate
  misc_feature 1..19: note = RNA
  misc_feature 20..21: note = DNA
ccggacgtgcacggatccttt

SEQ ID NO: 1463 - DNA, 21 bp, synthetic construct
  source 1..21: mol_type = other DNA
  modified_base 1: mod_base = OTHER; note = cytidine-3'-phosphate
  modified_base 2: mod_base = OTHER; note = guanosine-3'-phosphate
  modified_base 3: mod_base = OTHER; note = guanosine-3'-phosphate
  modified_base 4: mod_base = OTHER; note = adenosine-3'-phosphate
  modified_base 5: mod_base = OTHER; note = uridine-3'-phosphate
  modified_base 6: mod_base = OTHER; note = cytidine-3'-phosphate
  modified_base 7: mod_base = OTHER; note = cytidine-3'-phosphate
  modified_base 8: mod_base = OTHER; note = uridine-3'-phosphate
  modified_base 9: mod_base = OTHER; note = cytidine-3'-phosphate
  modified_base 10: mod_base = OTHER; note = cytidine-3'-phosphate
  modified_base 11: mod_base = OTHER; note = adenosine-3'-phosphate
  modified_base 12: mod_base = OTHER; note = uridine-3'-phosphate
  modified_base 13: mod_base = OTHER; note = cytidine-3'-phosphate
  modified_base 14: mod_base = OTHER; note = cytidine-3'-phosphate
  modified_base 15: mod_base = OTHER; note = uridine-3'-phosphate
  modified_base 16: mod_base = OTHER; note = cytidine-3'-phosphate
  modified_base 17: mod_base = OTHER; note = cytidine-3'-phosphate
  modified_base 18: mod_base = OTHER; note = cytidine-3'-phosphate
  modified_base 19: mod_base = OTHER; note = adenosine-3'-phosphate
  misc_feature 1..19: note = RNA
  misc_feature 20..21: note = DNA
cggatcctccatcctcccatt

SEQ ID NO: 1464 - DNA, 21 bp, synthetic construct
  source 1..21: mol_type = other DNA
  modified_base 1: mod_base = OTHER; note = cytidine-3'-phosphate
  modified_base 2: mod_base = OTHER; note = adenosine-3'-phosphate
  modified_base 3: mod_base = OTHER; note = uridine-3'-phosphate
  modified_base 4: mod_base = OTHER; note = cytidine-3'-phosphate
  modified_base 5: mod_base = OTHER; note = cytidine-3'-phosphate
  modified_base 6: mod_base = OTHER; note = uridine-3'-phosphate
  modified_base 7: mod_base = OTHER; note = cytidine-3'-phosphate
  modified_base 8: mod_base = OTHER; note = cytidine-3'-phosphate
  modified_base 9: mod_base = OTHER; note = cytidine-3'-phosphate
  modified_base 10: mod_base = OTHER; note = cytidine-3'-phosphate
  modified_base 11: mod_base = OTHER; note = guanosine-3'-phosphate
  modified_base 12: mod_base = OTHER; note = guanosine-3'-phosphate
  modified_base 13: mod_base = OTHER; note = cytidine-3'-phosphate
  modified_base 14: mod_base = OTHER; note = adenosine-3'-phosphate
  modified_base 15: mod_base = OTHER; note = uridine-3'-phosphate
  modified_base 16: mod_base = OTHER; note = guanosine-3'-phosphate
  modified_base 17: mod_base = OTHER; note = cytidine-3'-phosphate
  modified_base 18: mod_base = OTHER; note = uridine-3'-phosphate
  modified_base 19: mod_base = OTHER; note = adenosine-3'-phosphate
  misc_feature 1..19: note = RNA
  misc_feature 20..21: note = DNA
catcctccccggcatgctatt

SEQ ID NO: 1465 - DNA, 21 bp, synthetic construct
  source 1..21: mol_type = other DNA
  modified_base 1: mod_base = OTHER; note = cytidine-3'-phosphate
  modified_base 2: mod_base = OTHER; note = adenosine-3'-phosphate
  modified_base 3: mod_base = OTHER; note = uridine-3'-phosphate
  modified_base 4: mod_base = OTHER; note = guanosine-3'-phosphate
  modified_base 5: mod_base = OTHER; note = cytidine-3'-phosphate
  modified_base 6: mod_base = OTHER; note = uridine-3'-phosphate
  modified_base 7: mod_base = OTHER; note = cytidine-3'-phosphate
  modified_base 8: mod_base = OTHER; note = uridine-3'-phosphate
  modified_base 9: mod_base = OTHER; note = guanosine-3'-phosphate
  modified_base 10: mod_base = OTHER; note = cytidine-3'-phosphate
  modified_base 11: mod_base = OTHER; note = guanosine-3'-phosphate
  modified_base 12: mod_base = OTHER; note = cytidine-3'-phosphate
  modified_base 13: mod_base = OTHER; note = adenosine-3'-phosphate
  modified_base 14: mod_base = OTHER; note = guanosine-3'-phosphate
  modified_base 15: mod_base = OTHER; note = guanosine-3'-phosphate
  modified_base 16: mod_base = OTHER; note = guanosine-3'-phosphate
  modified_base 17: mod_base = OTHER; note = uridine-3'-phosphate
  modified_base 18: mod_base = OTHER; note = uridine-3'-phosphate
  modified_base 19: mod_base = OTHER; note = adenosine-3'-phosphate
  misc_feature 1..19: note = RNA
  misc_feature 20..21: note = DNA
catgctctgcgcagggttatt

SEQ ID NO: 1466 - DNA, 21 bp, synthetic construct
  source 1..21: mol_type = other DNA
  modified_base 1: mod_base = OTHER; note = adenosine-3'-phosphate
  modified_base 2: mod_base = OTHER; note = guanosine-3'-phosphate
  modified_base 3: mod_base = OTHER; note = guanosine-3'-phosphate
  modified_base 4: mod_base = OTHER; note = guanosine-3'-phosphate
  modified_base 5: mod_base = OTHER; note = uridine-3'-phosphate
  modified_base 6: mod_base = OTHER; note = uridine-3'-phosphate
  modified_base 7: mod_base = OTHER; note = cytidine-3'-phosphate
  modified_base 8: mod_base = OTHER; note = cytidine-3'-phosphate
  modified_base 9: mod_base = OTHER; note = uridine-3'-phosphate
  modified_base 10: mod_base = OTHER; note = cytidine-3'-phosphate
  modified_base 11: mod_base = OTHER; note = guanosine-3'-phosphate
  modified_base 12: mod_base = OTHER; note = adenosine-3'-phosphate
  modified_base 13: mod_base = OTHER; note = guanosine-3'-phosphate
  modified_base 14: mod_base = OTHER; note = guanosine-3'-phosphate
  modified_base 15: mod_base = OTHER; note = guanosine-3'-phosphate
  modified_base 16: mod_base = OTHER; note = cytidine-3'-phosphate
  modified_base 17: mod_base = OTHER; note = guanosine-3'-phosphate
  modified_base 18: mod_base = OTHER; note = guanosine-3'-phosphate
  modified_base 19: mod_base = OTHER; note = adenosine-3'-phosphate
  misc_feature 1..19: note = RNA
  misc_feature 20..21: note = DNA
agggttcctcgagggcggatt

SEQ ID NO: 1467 - DNA, 21 bp, synthetic construct
  source 1..21: mol_type = other DNA
  modified_base 1: mod_base = OTHER; note = guanosine-3'-phosphate
  modified_base 2: mod_base = OTHER; note = adenosine-3'-phosphate
  modified_base 3: mod_base = OTHER; note = guanosine-3'-phosphate
  modified_base 4: mod_base = OTHER; note = guanosine-3'-phosphate
  modified_base 5: mod_base = OTHER; note = guanosine-3'-phosphate
  modified_base 6: mod_base = OTHER; note = cytidine-3'-phosphate
  modified_base 7: mod_base = OTHER; note = guanosine-3'-phosphate
  modified_base 8: mod_base = OTHER; note = guanosine-3'-phosphate
  modified_base 9: mod_base = OTHER; note = cytidine-3'-phosphate
  modified_base 10: mod_base = OTHER; note = adenosine-3'-phosphate
  modified_base 11: mod_base = OTHER; note = cytidine-3'-phosphate
  modified_base 12: mod_base = OTHER; note = cytidine-3'-phosphate
  modified_base 13: mod_base = OTHER; note = guanosine-3'-phosphate
  modified_base 14: mod_base = OTHER; note = adenosine-3'-phosphate
  modified_base 15: mod_base = OTHER; note = uridine-3'-phosphate
  modified_base 16: mod_base = OTHER; note = guanosine-3'-phosphate
  modified_base 17: mod_base = OTHER; note = cytidine-3'-phosphate
  modified_base 18: mod_base = OTHER; note = guanosine-3'-phosphate
  modified_base 19: mod_base = OTHER; note = uridine-3'-phosphate
  misc_feature 1..19: note = RNA
  misc_feature 20..21: note = DNA
gagggcggcaccgatgcgttt

SEQ ID NO: 1468 - DNA, 21 bp, synthetic construct
  source 1..21: mol_type = other DNA
  modified_base 1: mod_base = OTHER; note = guanosine-3'-phosphate
  modified_base 2: mod_base = OTHER; note = adenosine-3'-phosphate
  modified_base 3: mod_base = OTHER; note = uridine-3'-phosphate
  modified_base 4: mod_base = OTHER; note = guanosine-3'-phosphate
  modified_base 5: mod_base = OTHER; note = cytidine-3'-phosphate
  modified_base 6: mod_base = OTHER; note = guanosine-3'-phosphate
  modified_base 7: mod_base = OTHER; note = uridine-3'-phosphate
  modified_base 8: mod_base = OTHER; note = guanosine-3'-phosphate
  modified_base 9: mod_base = OTHER; note = cytidine-3'-phosphate
  modified_base 10: mod_base = OTHER; note = cytidine-3'-phosphate
  modified_base 11: mod_base = OTHER; note = adenosine-3'-phosphate
  modified_base 12: mod_base = OTHER; note = guanosine-3'-phosphate
  modified_base 13: mod_base = OTHER; note = guanosine-3'-phosphate
  modified_base 14: mod_base = OTHER; note = guanosine-3'-phosphate
  modified_base 15: mod_base = OTHER; note = uridine-3'-phosphate
  modified_base 16: mod_base = OTHER; note = guanosine-3'-phosphate
  modified_base 17: mod_base = OTHER; note = adenosine-3'-phosphate
  modified_base 18: mod_base = OTHER; note = uridine-3'-phosphate
  modified_base 19: mod_base = OTHER; note = uridine-3'-phosphate
  misc_feature 1..19: note = RNA
  misc_feature 20..21: note = DNA
gatgcgtgccagggtgatttt

SEQ ID NO: 1469 - DNA, 21 bp, synthetic construct
  source 1..21: mol_type = other DNA
  modified_base 1: mod_base = OTHER; note = adenosine-3'-phosphate
  modified_base 2: mod_base = OTHER; note = guanosine-3'-phosphate
  modified_base 3: mod_base = OTHER; note = guanosine-3'-phosphate
  modified_base 4: mod_base = OTHER; note = guanosine-3'-phosphate
  modified_base 5: mod_base = OTHER; note = uridine-3'-phosphate
  modified_base 6: mod_base = OTHER; note = guanosine-3'-phosphate
  modified_base 7: mod_base = OTHER; note = adenosine-3'-phosphate
  modified_base 8: mod_base = OTHER; note = uridine-3'-phosphate
  modified_base 9: mod_base = OTHER; note = uridine-3'-phosphate
  modified_base 10: mod_base = OTHER; note = cytidine-3'-phosphate
  modified_base 11: mod_base = OTHER; note = cytidine-3'-phosphate
  modified_base 12: mod_base = OTHER; note = guanosine-3'-phosphate
  modified_base 13: mod_base = OTHER; note = guanosine-3'-phosphate
  modified_base 14: mod_base = OTHER; note = adenosine-3'-phosphate
  modified_base 15: mod_base = OTHER; note = guanosine-3'-phosphate
  modified_base 16: mod_base = OTHER; note = guanosine-3'-phosphate
  modified_base 17: mod_base = OTHER; note = cytidine-3'-phosphate
  modified_base 18: mod_base = OTHER; note = cytidine-3'-phosphate
  modified_base 19: mod_base = OTHER; note = adenosine-3'-phosphate
  misc_feature 1..19: note = RNA
  misc_feature 20..21: note = DNA
agggtgattccggaggccatt

SEQ ID NO: 1470 - DNA, 21 bp, synthetic construct
  source 1..21: mol_type = other DNA
  modified_base 1: mod_base = OTHER; note = cytidine-3'-phosphate
  modified_base 2: mod_base = OTHER; note = guanosine-3'-phosphate
  modified_base 3: mod_base = OTHER; note = guanosine-3'-phosphate
  modified_base 4: mod_base = OTHER; note = adenosine-3'-phosphate
  modified_base 5: mod_base = OTHER; note = guanosine-3'-phosphate
  modified_base 6: mod_base = OTHER; note = guanosine-3'-phosphate
  modified_base 7: mod_base = OTHER; note = cytidine-3'-phosphate
  modified_base 8: mod_base = OTHER; note = cytidine-3'-phosphate
  modified_base 9: mod_base = OTHER; note = cytidine-3'-phosphate
  modified_base 10: mod_base = OTHER; note = guanosine-3'-phosphate
  modified_base 11: mod_base = OTHER; note = cytidine-3'-phosphate
  modified_base 12: mod_base = OTHER; note = uridine-3'-phosphate
  modified_base 13: mod_base = OTHER; note = guanosine-3'-phosphate
  modified_base 14: mod_base = OTHER; note = guanosine-3'-phosphate
  modified_base 15: mod_base = OTHER; note = uridine-3'-phosphate
  modified_base 16: mod_base = OTHER; note = guanosine-3'-phosphate
  modified_base 17: mod_base = OTHER; note = uridine-3'-phosphate
  modified_base 18: mod_base = OTHER; note = guanosine-3'-phosphate
  modified_base 19: mod_base = OTHER; note = uridine-3'-phosphate
  misc_feature 1..19: note = RNA
  misc_feature 20..21: note = DNA
cggaggcccgctggtgtgttt

SEQ ID NO: 1471 - DNA, 21 bp, synthetic construct
  source 1..21: mol_type = other DNA
  modified_base 1: mod_base = OTHER; note = guanosine-3'-phosphate
  modified_base 2: mod_base = OTHER; note = guanosine-3'-phosphate
  modified_base 3: mod_base = OTHER; note = uridine-3'-phosphate
  modified_base 4: mod_base = OTHER; note = guanosine-3'-phosphate
  modified_base 5: mod_base = OTHER; note = uridine-3'-phosphate
  modified_base 6: mod_base = OTHER; note = guanosine-3'-phosphate
  modified_base 7: mod_base = OTHER; note = uridine-3'-phosphate
  modified_base 8: mod_base = OTHER; note = guanosine-3'-phosphate
  modified_base 9: mod_base = OTHER; note = adenosine-3'-phosphate
  modified_base 10: mod_base = OTHER; note = guanosine-3'-phosphate
  modified_base 11: mod_base = OTHER; note = guanosine-3'-phosphate
  modified_base 12: mod_base = OTHER; note = adenosine-3'-phosphate
  modified_base 13: mod_base = OTHER; note = cytidine-3'-phosphate
  modified_base 14: mod_base = OTHER; note = cytidine-3'-phosphate
  modified_base 15: mod_base = OTHER; note = adenosine-3'-phosphate
  modified_base 16: mod_base = OTHER; note = adenosine-3'-phosphate
  modified_base 17: mod_base = OTHER; note = guanosine-3'-phosphate
  modified_base 18: mod_base = OTHER; note = cytidine-3'-phosphate
  modified_base 19: mod_base = OTHER; note = uridine-3'-phosphate
  misc_feature 1..19: note = RNA
  misc_feature 20..21: note = DNA
ggtgtgtgaggaccaagcttt

SEQ ID NO: 1472 - DNA, 21 bp, synthetic construct
  source 1..21: mol_type = other DNA
  modified_base 1: mod_base = OTHER; note = cytidine-3'-phosphate
  modified_base 2: mod_base = OTHER; note = cytidine-3'-phosphate
  modified_base 3: mod_base = OTHER; note = adenosine-3'-phosphate
  modified_base 4: mod_base = OTHER; note = adenosine-3'-phosphate
  modified_base 5: mod_base = OTHER; note = guanosine-3'-phosphate
  modified_base 6: mod_base = OTHER; note = cytidine-3'-phosphate
  modified_base 7: mod_base = OTHER; note = uridine-3'-phosphate
  modified_base 8: mod_base = OTHER; note = guanosine-3'-phosphate
  modified_base 9: mod_base = OTHER; note = cytidine-3'-phosphate
  modified_base 10: mod_base = OTHER; note = adenosine-3'-phosphate
  modified_base 11: mod_base = OTHER; note = guanosine-3'-phosphate
  modified_base 12: mod_base = OTHER; note = adenosine-3'-phosphate
  modified_base 13: mod_base = OTHER; note = guanosine-3'-phosphate
  modified_base 14: mod_base = OTHER; note = cytidine-3'-phosphate
  modified_base 15: mod_base = OTHER; note = guanosine-3'-phosphate
  modified_base 16: mod_base = OTHER; note = cytidine-3'-phosphate
  modified_base 17: mod_base = OTHER; note = cytidine-3'-phosphate
  modified_base 18: mod_base = OTHER; note = guanosine-3'-phosphate
  modified_base 19: mod_base = OTHER; note = adenosine-3'-phosphate
  misc_feature 1..19: note = RNA
  misc_feature 20..21: note = DNA
ccaagctgcagagcgccgatt

SEQ ID NO: 1473 - DNA, 21 bp, synthetic construct
  source 1..21: mol_type = other DNA
  modified_base 1: mod_base = OTHER; note = adenosine-3'-phosphate
  modified_base 2: mod_base = OTHER; note = guanosine-3'-phosphate
  modified_base 3: mod_base = OTHER; note = adenosine-3'-phosphate
  modified_base 4: mod_base = OTHER; note = guanosine-3'-phosphate
  modified_base 5: mod_base = OTHER; note = cytidine-3'-phosphate
  modified_base 6: mod_base = OTHER; note = guanosine-3'-phosphate
  modified_base 7: mod_base = OTHER; note = cytidine-3'-phosphate
  modified_base 8: mod_base = OTHER; note = cytidine-3'-phosphate
  modified_base 9: mod_base = OTHER; note = guanosine-3'-phosphate
  modified_base 10: mod_base = OTHER; note = guanosine-3'-phosphate
  modified_base 11: mod_base = OTHER; note = cytidine-3'-phosphate
  modified_base 12: mod_base = OTHER; note = uridine-3'-phosphate
  modified_base 13: mod_base = OTHER; note = cytidine-3'-phosphate
  modified_base 14: mod_base = OTHER; note = adenosine-3'-phosphate
  modified_base 15: mod_base = OTHER; note = cytidine-3'-phosphate
  modified_base 16: mod_base = OTHER; note = cytidine-3'-phosphate
  modified_base 17: mod_base = OTHER; note = cytidine-3'-phosphate
  modified_base 18: mod_base = OTHER; note = uridine-3'-phosphate
  modified_base 19: mod_base = OTHER; note = adenosine-3'-phosphate
  misc_feature 1..19: note = RNA
  misc_feature 20..21: note = DNA
agagcgccggctcaccctatt

SEQ ID NO: 1474 - DNA, 21 bp, synthetic construct
  source 1..21: mol_type = other DNA
  modified_base 1: mod_base = OTHER; note = uridine-3'-phosphate
  modified_base 2: mod_base = OTHER; note = cytidine-3'-phosphate
  modified_base 3: mod_base = OTHER; note = adenosine-3'-phosphate
  modified_base 4: mod_base = OTHER; note = cytidine-3'-phosphate
  modified_base 5: mod_base = OTHER; note = cytidine-3'-phosphate
  modified_base 6: mod_base = OTHER; note = cytidine-3'-phosphate
  modified_base 7: mod_base = OTHER; note = uridine-3'-phosphate
  modified_base 8: mod_base = OTHER; note = guanosine-3'-phosphate
  modified_base 9: mod_base = OTHER; note = cytidine-3'-phosphate
  modified_base 10: mod_base = OTHER; note = adenosine-3'-phosphate
  modified_base 11: mod_base = OTHER; note = adenosine-3'-phosphate
  modified_base 12: mod_base = OTHER; note = guanosine-3'-phosphate
  modified_base 13: mod_base = OTHER; note = guanosine-3'-phosphate
  modified_base 14: mod_base = OTHER; note = cytidine-3'-phosphate
  modified_base 15: mod_base = OTHER; note = adenosine-3'-phosphate
  modified_base 16: mod_base = OTHER; note = uridine-3'-phosphate
  modified_base 17: mod_base = OTHER; note = cytidine-3'-phosphate
  modified_base 18: mod_base = OTHER; note = adenosine-3'-phosphate
  modified_base 19: mod_base = OTHER; note = uridine-3'-phosphate
  misc_feature 1..19: note = RNA
  misc_feature 20..21: note = DNA
tcaccctgcaaggcatcattt

SEQ ID NO: 1475 - DNA, 21 bp, synthetic construct
  source 1..21: mol_type = other DNA
  modified_base 1: mod_base = OTHER; note = guanosine-3'-phosphate
  modified_base 2: mod_base = OTHER; note = guanosine-3'-phosphate
  modified_base 3: mod_base = OTHER; note = cytidine-3'-phosphate
  modified_base 4: mod_base = OTHER; note = adenosine-3'-phosphate
  modified_base 5: mod_base = OTHER; note = uridine-3'-phosphate
  modified_base 6: mod_base = OTHER; note = cytidine-3'-phosphate
  modified_base 7: mod_base = OTHER; note = adenosine-3'-phosphate
  modified_base 8: mod_base = OTHER; note = uridine-3'-phosphate
  modified_base 9: mod_base = OTHER; note = cytidine-3'-phosphate
  modified_base 10: mod_base = OTHER; note = adenosine-3'-phosphate
  modified_base 11: mod_base = OTHER; note = guanosine-3'-phosphate
  modified_base 12: mod_base = OTHER; note = cytidine-3'-phosphate
  modified_base 13: mod_base = OTHER; note = uridine-3'-phosphate
  modified_base 14: mod_base = OTHER; note = guanosine-3'-phosphate
  modified_base 15: mod_base = OTHER; note = guanosine-3'-phosphate
  modified_base 16: mod_base = OTHER; note = guanosine-3'-phosphate
  modified_base 17: mod_base = OTHER; note = guanosine-3'-phosphate
  modified_base 18: mod_base = OTHER; note = adenosine-3'-phosphate
  modified_base 19: mod_base = OTHER; note = uridine-3'-phosphate
  misc_feature 1..19: note = RNA
  misc_feature 20..21: note = DNA
ggcatcatcagctggggattt

SEQ ID NO: 1476 - DNA, 21 bp, synthetic construct
  source 1..21: mol_type = other DNA
  modified_base 1: mod_base = OTHER; note = cytidine-3'-phosphate
  modified_base 2: mod_base = OTHER; note = uridine-3'-phosphate
  modified_base 3: mod_base = OTHER; note = guanosine-3'-phosphate
  modified_base 4: mod_base = OTHER; note = guanosine-3'-phosphate
  modified_base 5: mod_base = OTHER; note = guanosine-3'-phosphate
  modified_base 6: mod_base = OTHER; note = guanosine-3'-phosphate
  modified_base 7: mod_base = OTHER; note = adenosine-3'-phosphate
  modified_base 8: mod_base = OTHER; note = uridine-3'-phosphate
  modified_base 9: mod_base = OTHER; note = cytidine-3'-phosphate
  modified_base 10: mod_base = OTHER; note = guanosine-3'-phosphate
  modified_base 11: mod_base = OTHER; note = guanosine-3'-phosphate
  modified_base 12: mod_base = OTHER; note = guanosine-3'-phosphate
  modified_base 13: mod_base = OTHER; note = cytidine-3'-phosphate
  modified_base 14: mod_base = OTHER; note = uridine-3'-phosphate
  modified_base 15: mod_base = OTHER; note = guanosine-3'-phosphate
  modified_base 16: mod_base = OTHER; note = uridine-3'-phosphate
  modified_base 17: mod_base = OTHER; note = guanosine-3'-phosphate
  modified_base 18: mod_base = OTHER; note = guanosine-3'-phosphate
  modified_base 19: mod_base = OTHER; note = uridine-3'-phosphate
  misc_feature 1..19: note = RNA
  misc_feature 20..21: note = DNA
ctggggatcgggctgtggttt

SEQ ID NO: 1477 - DNA, 21 bp, synthetic construct
  source 1..21: mol_type = other DNA
  modified_base 1: mod_base = OTHER; note = uridine-3'-phosphate
  modified_base 2: mod_base = OTHER; note = guanosine-3'-phosphate
  modified_base 3: mod_base = OTHER; note = uridine-3'-phosphate
  modified_base 4: mod_base = OTHER; note = guanosine-3'-phosphate
  modified_base 5: mod_base = OTHER; note = guanosine-3'-phosphate
  modified_base 6: mod_base = OTHER; note = uridine-3'-phosphate
  modified_base 7: mod_base = OTHER; note = guanosine-3'-phosphate
  modified_base 8: mod_base = OTHER; note = adenosine-3'-phosphate
  modified_base 9: mod_base = OTHER; note = cytidine-3'-phosphate
  modified_base 10: mod_base = OTHER; note = cytidine-3'-phosphate
  modified_base 11: mod_base = OTHER; note = guanosine-3'-phosphate
  modified_base 12: mod_base = OTHER; note = cytidine-3'-phosphate
  modified_base 13: mod_base = OTHER; note = adenosine-3'-phosphate
  modified_base 14: mod_base = OTHER; note = adenosine-3'-phosphate
  modified_base 15: mod_base = OTHER; note = cytidine-3'-phosphate
  modified_base 16: mod_base = OTHER; note = adenosine-3'-phosphate
  modified_base 17: mod_base = OTHER; note = adenosine-3'-phosphate
  modified_base 18: mod_base = OTHER; note = guanosine-3'-phosphate
  modified_base 19: mod_base = OTHER; note = adenosine-3'-phosphate
  misc_feature 1..19: note = RNA
  misc_feature 20..21: note = DNA
tgtggtgaccgcaacaagatt

SEQ ID NO: 1478 - DNA, 21 bp, synthetic construct
  source 1..21: mol_type = other DNA
  modified_base 1: mod_base = OTHER; note = cytidine-3'-phosphate
  modified_base 2: mod_base = OTHER; note = adenosine-3'-phosphate
  modified_base 3: mod_base = OTHER; note = adenosine-3'-phosphate
  modified_base 4: mod_base = OTHER; note = cytidine-3'-phosphate
  modified_base 5: mod_base = OTHER; note = adenosine-3'-phosphate
  modified_base 6: mod_base = OTHER; note = adenosine-3'-phosphate
  modified_base 7: mod_base = OTHER; note = guanosine-3'-phosphate
  modified_base 8: mod_base = OTHER; note = cytidine-3'-phosphate
  modified_base 9: mod_base = OTHER; note = cytidine-3'-phosphate
  modified_base 10: mod_base = OTHER; note = adenosine-3'-phosphate
  modified_base 11: mod_base = OTHER; note = guanosine-3'-phosphate
  modified_base 12: mod_base = OTHER; note = guanosine-3'-phosphate
  modified_base 13: mod_base = OTHER; note = cytidine-3'-phosphate
  modified_base 14: mod_base = OTHER; note = guanosine-3'-phosphate
  modified_base 15: mod_base = OTHER; note = uridine-3'-phosphate
  modified_base 16: mod_base = OTHER; note = cytidine-3'-phosphate
  modified_base 17: mod_base = OTHER; note = uridine-3'-phosphate
  modified_base 18: mod_base = OTHER; note = adenosine-3'-phosphate
  modified_base 19: mod_base = OTHER; note = adenosine-3'-phosphate
  misc_feature 1..19: note = RNA
  misc_feature 20..21: note = DNA
caacaagccaggcgtctaatt

SEQ ID NO: 1479 - DNA, 21 bp, synthetic construct
  source 1..21: mol_type = other DNA
  modified_base 1: mod_base = OTHER; note = adenosine-3'-phosphate
  modified_base 2: mod_base = OTHER; note = guanosine-3'-phosphate
  modified_base 3: mod_base = OTHER; note = guanosine-3'-phosphate
  modified_base 4: mod_base = OTHER; note = cytidine-3'-phosphate
  modified_base 5: mod_base = OTHER; note = guanosine-3'-phosphate
  modified_base 6: mod_base = OTHER; note = uridine-3'-phosphate
  modified_base 7: mod_base = OTHER; note = cytidine-3'-phosphate
  modified_base 8: mod_base = OTHER; note = uridine-3'-phosphate
  modified_base 9: mod_base = OTHER; note = adenosine-3'-phosphate
  modified_base 10: mod_base = OTHER; note = cytidine-3'-phosphate
  modified_base 11: mod_base = OTHER; note = adenosine-3'-phosphate
  modified_base 12: mod_base = OTHER; note = cytidine-3'-phosphate
  modified_base 13: mod_base = OTHER; note = cytidine-3'-phosphate
  modified_base 14: mod_base = OTHER; note = guanosine-3'-phosphate
  modified_base 15: mod_base = OTHER; note = adenosine-3'-phosphate
  modified_base 16: mod_base = OTHER; note = uridine-3'-phosphate
  modified_base 17: mod_base = OTHER; note = guanosine-3'-phosphate
  modified_base 18: mod_base = OTHER; note = uridine-3'-phosphate
  modified_base 19: mod_base = OTHER; note = adenosine-3'-phosphate
  misc_feature 1..19: note = RNA
  misc_feature 20..21: note = DNA
aggcgtctacaccgatgtatt

SEQ ID NO: 1480 - DNA, 21 bp, synthetic construct
  source 1..21: mol_type = other DNA
  modified_base 1: mod_base = OTHER; note = guanosine-3'-phosphate
  modified_base 2: mod_base = OTHER; note = adenosine-3'-phosphate
  modified_base 3: mod_base = OTHER; note = uridine-3'-phosphate
  modified_base 4: mod_base = OTHER; note = guanosine-3'-phosphate
  modified_base 5: mod_base = OTHER; note = uridine-3'-phosphate
  modified_base 6: mod_base = OTHER; note = guanosine-3'-phosphate
  modified_base 7: mod_base = OTHER; note = guanosine-3'-phosphate
  modified_base 8: mod_base = OTHER; note = cytidine-3'-phosphate
  modified_base 9: mod_base = OTHER; note = cytidine-3'-phosphate
  modified_base 10: mod_base = OTHER; note = uridine-3'-phosphate
  modified_base 11: mod_base = OTHER; note = adenosine-3'-phosphate
  modified_base 12: mod_base = OTHER; note = cytidine-3'-phosphate
  modified_base 13: mod_base = OTHER; note = uridine-3'-phosphate
  modified_base 14: mod_base = OTHER; note = adenosine-3'-phosphate
  modified_base 15: mod_base = OTHER; note = cytidine-3'-phosphate
  modified_base 16: mod_base = OTHER; note = cytidine-3'-phosphate
  modified_base 17: mod_base = OTHER; note = uridine-3'-phosphate
  modified_base 18: mod_base = OTHER; note = guanosine-3'-phosphate
  modified_base 19: mod_base = OTHER; note = adenosine-3'-phosphate
  misc_feature 1..19: note = RNA
  misc_feature 20..21: note = DNA
gatgtggcctactacctgatt

SEQ ID NO: 1481 - DNA, 21 bp, synthetic construct
  source 1..21: mol_type = other DNA
  modified_base 1: mod_base = OTHER; note = uridine-3'-phosphate
  modified_base 2: mod_base = OTHER; note = adenosine-3'-phosphate
  modified_base 3: mod_base = OTHER; note = cytidine-3'-phosphate
  modified_base 4: mod_base = OTHER; note = uridine-3'-phosphate
  modified_base 5: mod_base = OTHER; note = adenosine-3'-phosphate
  modified_base 6: mod_base = OTHER; note = cytidine-3'-phosphate
  modified_base 7: mod_base = OTHER; note = cytidine-3'-phosphate
  modified_base 8: mod_base = OTHER; note = uridine-3'-phosphate
  modified_base 9: mod_base = OTHER; note = guanosine-3'-phosphate
  modified_base 10: mod_base = OTHER; note = guanosine-3'-phosphate
  modified_base 11: mod_base = OTHER; note = cytidine-3'-phosphate
  modified_base 12: mod_base = OTHER; note = cytidine-3'-phosphate
  modified_base 13: mod_base = OTHER; note = uridine-3'-phosphate
  modified_base 14: mod_base = OTHER; note = guanosine-3'-phosphate
  modified_base 15: mod_base = OTHER; note = guanosine-3'-phosphate
  modified_base 16: mod_base = OTHER; note = adenosine-3'-phosphate
  modified_base 17: mod_base = OTHER; note = uridine-3'-phosphate
  modified_base 18: mod_base = OTHER; note = cytidine-3'-phosphate
  modified_base 19: mod_base = OTHER; note = adenosine-3'-phosphate
  misc_feature 1..19: note = RNA
  misc_feature 20..21: note = DNA
tactacctggcctggatcatt

SEQ ID NO: 1482 - DNA, 21 bp, synthetic construct
  source 1..21: mol_type = other DNA
  modified_base 1: mod_base = OTHER; note = cytidine-3'-phosphate
  modified_base 2: mod_base = OTHER; note = uridine-3'-phosphate
  modified_base 3: mod_base = OTHER; note = guanosine-3'-phosphate
  modified_base 4: mod_base = OTHER; note = guanosine-3'-phosphate
  modified_base 5: mod_base = OTHER; note = adenosine-3'-phosphate
  modified_base 6: mod_base = OTHER; note = uridine-3'-phosphate
  modified_base 7: mod_base = OTHER; note = cytidine-3'-phosphate
  modified_base 8: mod_base = OTHER; note = cytidine-3'-phosphate
  modified_base 9: mod_base = OTHER; note = guanosine-3'-phosphate
  modified_base 10: mod_base = OTHER; note = guanosine-3'-phosphate
  modified_base 11: mod_base = OTHER; note = guanosine-3'-phosphate
  modified_base 12: mod_base = OTHER; note = adenosine-3'-phosphate
  modified_base 13: mod_base = OTHER; note = guanosine-3'-phosphate
  modified_base 14: mod_base = OTHER; note = cytidine-3'-phosphate
  modified_base 15: mod_base = OTHER; note = adenosine-3'-phosphate
  modified_base 16: mod_base = OTHER; note = cytidine-3'-phosphate
  modified_base 17: mod_base = OTHER; note = adenosine-3'-phosphate
  modified_base 18: mod_base = OTHER; note = cytidine-3'-phosphate
  modified_base 19: mod_base = OTHER; note = adenosine-3'-phosphate
  misc_feature 1..19: note = RNA
  misc_feature 20..21: note = DNA
ctggatccgggagcacacatt

SEQ ID NO: 1483 - DNA, 21 bp, synthetic construct
  source 1..21: mol_type = other DNA
  modified_base 1: mod_base = OTHER; note = adenosine-3'-phosphate
  modified_base 2: mod_base = OTHER; note = guanosine-3'-phosphate
  modified_base 3: mod_base = OTHER; note = cytidine-3'-phosphate
  modified_base 4: mod_base = OTHER; note = adenosine-3'-phosphate
  modified_base 5: mod_base = OTHER; note = cytidine-3'-phosphate
  modified_base 6: mod_base = OTHER; note = adenosine-3'-phosphate
  modified_base 7: mod_base = OTHER; note = cytidine-3'-phosphate
  modified_base 8: mod_base = OTHER; note = cytidine-3'-phosphate
  modified_base 9: mod_base = OTHER; note = guanosine-3'-phosphate
  modified_base 10: mod_base = OTHER; note = uridine-3'-phosphate
  modified_base 11: mod_base = OTHER; note = uridine-3'-phosphate
  modified_base 12: mod_base = OTHER; note = uridine-3'-phosphate
  modified_base 13: mod_base = OTHER; note = cytidine-3'-phosphate
  modified_base 14: mod_base = OTHER; note = cytidine-3'-phosphate
  modified_base 15: mod_base = OTHER; note = uridine-3'-phosphate
  modified_base 16: mod_base = OTHER; note = guanosine-3'-phosphate
  modified_base 17: mod_base = OTHER; note = adenosine-3'-phosphate
  modified_base 18: mod_base = OTHER; note = uridine-3'-phosphate
  modified_base 19: mod_base = OTHER; note = uridine-3'-phosphate
  misc_feature 1..19: note = RNA
  misc_feature 20..21: note = DNA
agcacaccgtttcctgatttt

SEQ ID NO: 1484 - DNA, 21 bp, synthetic construct
  source 1..21: mol_type = other DNA
  modified_base 1: mod_base = OTHER; note = uridine-3'-phosphate
  modified_base 2: mod_base = OTHER; note = cytidine-3'-phosphate
  modified_base 3: mod_base = OTHER; note = cytidine-3'-phosphate
  modified_base 4: mod_base = OTHER; note = uridine-3'-phosphate
  modified_base 5: mod_base = OTHER; note = guanosine-3'-phosphate
  modified_base 6: mod_base = OTHER; note = adenosine-3'-phosphate
  modified_base 7: mod_base = OTHER; note = uridine-3'-phosphate
  modified_base 8: mod_base = OTHER; note = uridine-3'-phosphate
  modified_base 9: mod_base = OTHER; note = guanosine-3'-phosphate
  modified_base 10: mod_base = OTHER; note = cytidine-3'-phosphate
  modified_base 11: mod_base = OTHER; note = uridine-3'-phosphate
  modified_base 12: mod_base = OTHER; note = cytidine-3'-phosphate
  modified_base 13: mod_base = OTHER; note = adenosine-3'-phosphate
  modified_base 14: mod_base = OTHER; note = guanosine-3'-phosphate
  modified_base 15: mod_base = OTHER; note = guanosine-3'-phosphate
  modified_base 16: mod_base = OTHER; note = guanosine-3'-phosphate
  modified_base 17: mod_base = OTHER; note = adenosine-3'-phosphate
  modified_base 18: mod_base = OTHER; note = cytidine-3'-phosphate
  modified_base 19: mod_base = OTHER; note = uridine-3'-phosphate
  misc_feature 1..19: note = RNA
  misc_feature 20..21: note = DNA
tcctgattgctcagggacttt

SEQ ID NO: 1485 - DNA, 21 bp, synthetic construct
  source 1..21: mol_type = other DNA
  modified_base 1: mod_base = OTHER; note = cytidine-3'-phosphate
  modified_base 2: mod_base = OTHER; note = adenosine-3'-phosphate
  modified_base 3: mod_base = OTHER; note = guanosine-3'-phosphate
  modified_base 4: mod_base = OTHER; note = guanosine-3'-phosphate
  modified_base 5: mod_base = OTHER; note = guanosine-3'-phosphate
  modified_base 6: mod_base = OTHER; note = adenosine-3'-phosphate
  modified_base 7: mod_base = OTHER; note = cytidine-3'-phosphate
  modified_base 8: mod_base = OTHER; note = uridine-3'-phosphate
  modified_base 9: mod_base = OTHER; note = cytidine-3'-phosphate
  modified_base 10: mod_base = OTHER; note = adenosine-3'-phosphate
  modified_base 11: mod_base = OTHER; note = uridine-3'-phosphate
  modified_base 12: mod_base = OTHER; note = cytidine-3'-phosphate
  modified_base 13: mod_base = OTHER; note = uridine-3'-phosphate
  modified_base 14: mod_base = OTHER; note = uridine-3'-phosphate
  modified_base 15: mod_base = OTHER; note = uridine-3'-phosphate
  modified_base 16: mod_base = OTHER; note = cytidine-3'-phosphate
  modified_base 17: mod_base = OTHER; note = cytidine-3'-phosphate
  modified_base 18: mod_base = OTHER; note = cytidine-3'-phosphate
  modified_base 19: mod_base = OTHER; note = uridine-3'-phosphate
  misc_feature 1..19: note = RNA
  misc_feature 20..21: note = DNA
cagggactcatctttcccttt

SEQ ID NO: 1486 - DNA, 21 bp, synthetic construct
  source 1..21: mol_type = other DNA
  modified_base 1: mod_base = OTHER; note = uridine-3'-phosphate
  modified_base 2: mod_base = OTHER; note = uridine-3'-phosphate
  modified_base 3: mod_base = OTHER; note = uridine-3'-phosphate
  modified_base 4: mod_base = OTHER; note = cytidine-3'-phosphate
  modified_base 5: mod_base = OTHER; note = cytidine-3'-phosphate
  modified_base 6: mod_base = OTHER; note = cytidine-3'-phosphate
  modified_base 7: mod_base = OTHER; note = uridine-3'-phosphate
  modified_base 8: mod_base = OTHER; note = cytidine-3'-phosphate
  modified_base 9: mod_base = OTHER; note = cytidine-3'-phosphate
  modified_base 10: mod_base = OTHER; note = uridine-3'-phosphate
  modified_base 11: mod_base = OTHER; note = uridine-3'-phosphate
  modified_base 12: mod_base = OTHER; note = guanosine-3'-phosphate
  modified_base 13: mod_base = OTHER; note = guanosine-3'-phosphate
  modified_base 14: mod_base = OTHER; note = uridine-3'-phosphate
  modified_base 15: mod_base = OTHER; note = guanosine-3'-phosphate
  modified_base 16: mod_base = OTHER; note = adenosine-3'-phosphate
  modified_base 17: mod_base = OTHER; note = uridine-3'-phosphate
  modified_base 18: mod_base = OTHER; note = uridine-3'-phosphate
  modified_base 19: mod_base = OTHER; note = adenosine-3'-phosphate
  misc_feature 1..19: note = RNA
  misc_feature 20..21: note = DNA
tttccctccttggtgattatt

SEQ ID NO: 1487 - DNA, 21 bp, synthetic construct
  source 1..21: mol_type = other DNA
  modified_base 1: mod_base = OTHER; note = uridine-3'-phosphate
  modified_base 2: mod_base = OTHER; note = guanosine-3'-phosphate
  modified_base 3: mod_base = OTHER; note = guanosine-3'-phosphate
  modified_base 4: mod_base = OTHER; note = uridine-3'-phosphate
  modified_base 5: mod_base = OTHER; note = guanosine-3'-phosphate
  modified_base 6: mod_base = OTHER; note = adenosine-3'-phosphate
  modified_base 7: mod_base = OTHER; note = uridine-3'-phosphate
  modified_base 8: mod_base = OTHER; note = uridine-3'-phosphate
  modified_base 9: mod_base = OTHER; note = cytidine-3'-phosphate
  modified_base 10: mod_base = OTHER; note = cytidine-3'-phosphate
  modified_base 11: mod_base = OTHER; note = guanosine-3'-phosphate
  modified_base 12: mod_base = OTHER; note = cytidine-3'-phosphate
  modified_base 13: mod_base = OTHER; note = adenosine-3'-phosphate
  modified_base 14: mod_base = OTHER; note = guanosine-3'-phosphate
  modified_base 15: mod_base = OTHER; note = uridine-3'-phosphate
  modified_base 16: mod_base = OTHER; note = guanosine-3'-phosphate
  modified_base 17: mod_base = OTHER; note = adenosine-3'-phosphate
  modified_base 18: mod_base = OTHER; note = guanosine-3'-phosphate
  modified_base 19: mod_base = OTHER; note = adenosine-3'-phosphate
  misc_feature 1..19: note = RNA
  misc_feature 20..21: note = DNA
tggtgattccgcagtgagatt

SEQ ID NO: 1488 - DNA, 21 bp, synthetic construct
  source 1..21: mol_type = other DNA
  modified_base 1: mod_base = OTHER; note = adenosine-3'-phosphate
  modified_base 2: mod_base = OTHER; note = guanosine-3'-phosphate
  modified_base 3: mod_base = OTHER; note = uridine-3'-phosphate
  modified_base 4: mod_base = OTHER; note = guanosine-3'-phosphate
  modified_base 5: mod_base = OTHER; note = adenosine-3'-phosphate
  modified_base 6: mod_base = OTHER; note = guanosine-3'-phosphate
  modified_base 7: mod_base = OTHER; note = adenosine-3'-phosphate
  modified_base 8: mod_base = OTHER; note = guanosine-3'-phosphate
  modified_base 9: mod_base = OTHER; note = adenosine-3'-phosphate
  modified_base 10: mod_base = OTHER; note = guanosine-3'-phosphate
  modified_base 11: mod_base = OTHER; note = uridine-3'-phosphate
  modified_base 12: mod_base = OTHER; note = guanosine-3'-phosphate
  modified_base 13: mod_base = OTHER; note = guanosine-3'-phosphate
  modified_base 14: mod_base = OTHER; note = cytidine-3'-phosphate
  modified_base 15: mod_base = OTHER; note = uridine-3'-phosphate
  modified_base 16: mod_base = OTHER; note = guanosine-3'-phosphate
  modified_base 17: mod_base = OTHER; note = guanosine-3'-phosphate
  modified_base 18: mod_base = OTHER; note = guanosine-3'-phosphate
  modified_base 19: mod_base = OTHER; note = adenosine-3'-phosphate
  misc_feature 1..19: note = RNA
  misc_feature 20..21: note = DNA
agtgagagagtggctgggatt

SEQ ID NO: 1489 - DNA, 21 bp, synthetic construct
  source 1..21: mol_type = other DNA
  modified_base 1: mod_base = OTHER; note = guanosine-3'-phosphate
  modified_base 2: mod_base = OTHER; note = cytidine-3'-phosphate
  modified_base 3: mod_base = OTHER; note = uridine-3'-phosphate
  modified_base 4: mod_base = OTHER; note = guanosine-3'-phosphate
  modified_base 5: mod_base = OTHER; note = guanosine-3'-phosphate
  modified_base 6: mod_base = OTHER; note = guanosine-3'-phosphate
  modified_base 7: mod_base = OTHER; note = guanosine-3'-phosphate
  modified_base 8: mod_base = OTHER; note = cytidine-3'-phosphate
  modified_base 9: mod_base = OTHER; note = adenosine-3'-phosphate
  modified_base 10: mod_base = OTHER; note = uridine-3'-phosphate
  modified_base 11: mod_base = OTHER; note = guanosine-3'-phosphate
  modified_base 12: mod_base = OTHER; note = guanosine-3'-phosphate
  modified_base 13: mod_base = OTHER; note = adenosine-3'-phosphate
  modified_base 14: mod_base = OTHER; note = adenosine-3'-phosphate
  modified_base 15: mod_base = OTHER; note = guanosine-3'-phosphate
  modified_base 16: mod_base = OTHER; note = guanosine-3'-phosphate
  modified_base 17: mod_base = OTHER; note = cytidine-3'-phosphate
  modified_base 18: mod_base = OTHER; note = adenosine-3'-phosphate
  modified_base 19: mod_base = OTHER; note = adenosine-3'-phosphate
  misc_feature 1..19: note = RNA
  misc_feature 20..21: note = DNA
gctggggcatggaaggcaatt

SEQ ID NO: 1490 - DNA, 21 bp, synthetic construct
  source 1..21: mol_type = other DNA
  modified_base 1: mod_base = OTHER; note = uridine-3'-phosphate
  modified_base 2: mod_base = OTHER; note = guanosine-3'-phosphate
  modified_base 3: mod_base = OTHER; note = guanosine-3'-phosphate
  modified_base 4: mod_base = OTHER; note = adenosine-3'-phosphate
  modified_base 5: mod_base = OTHER; note = adenosine-3'-phosphate
  modified_base 6: mod_base = OTHER; note = guanosine-3'-phosphate
  modified_base 7: mod_base = OTHER; note = guanosine-3'-phosphate
  modified_base 8: mod_base = OTHER; note = cytidine-3'-phosphate
  modified_base 9: mod_base = OTHER; note = adenosine-3'-phosphate
  modified_base 10: mod_base = OTHER; note = adenosine-3'-phosphate
  modified_base 11: mod_base = OTHER; note = guanosine-3'-phosphate
  modified_base 12: mod_base = OTHER; note = adenosine-3'-phosphate
  modified_base 13: mod_base = OTHER; note = uridine-3'-phosphate
  modified_base 14: mod_base = OTHER; note = uridine-3'-phosphate
  modified_base 15: mod_base = OTHER; note = guanosine-3'-phosphate
  modified_base 16: mod_base = OTHER; note = uridine-3'-phosphate
  modified_base 17: mod_base = OTHER; note = guanosine-3'-phosphate
  modified_base 18: mod_base = OTHER; note = uridine-3'-phosphate
  modified_base 19: mod_base = OTHER; note = adenosine-3'-phosphate
  misc_feature 1..19: note = RNA
  misc_feature 20..21: note = DNA
tggaaggcaagattgtgtatt

SEQ ID NO: 1491 - DNA, 21 bp, synthetic construct
  source 1..21: mol_type = other DNA
  modified_base 1: mod_base = OTHER; note = uridine-3'-phosphate
  modified_base 2: mod_base = OTHER; note = uridine-3'-phosphate
  modified_base 3: mod_base = OTHER; note = guanosine-3'-phosphate
  modified_base 4: mod_base = OTHER; note = uridine-3'-phosphate
  modified_base 5: mod_base = OTHER; note = guanosine-3'-phosphate
  modified_base 6: mod_base = OTHER; note = uridine-3'-phosphate
  modified_base 7: mod_base = OTHER; note = cytidine-3'-phosphate
  modified_base 8: mod_base = OTHER; note = cytidine-3'-phosphate
  modified_base 9: mod_base = OTHER; note = cytidine-3'-phosphate
  modified_base 10: mod_base = OTHER; note = adenosine-3'-phosphate
  modified_base 11: mod_base = OTHER; note = uridine-3'-phosphate
  modified_base 12: mod_base = OTHER; note = uridine-3'-phosphate
  modified_base 13: mod_base = OTHER; note = cytidine-3'-phosphate
  modified_base 14: mod_base = OTHER; note = cytidine-3'-phosphate
  modified_base 15: mod_base = OTHER; note = cytidine-3'-phosphate
  modified_base 16: mod_base = OTHER; note = cytidine-3'-phosphate
  modified_base 17: mod_base = OTHER; note = cytidine-3'-phosphate
  modified_base 18: mod_base = OTHER; note = adenosine-3'-phosphate
  modified_base 19: mod_base = OTHER; note = adenosine-3'-phosphate
  misc_feature 1..19: note = RNA
  misc_feature 20..21: note = DNA
ttgtgtcccattcccccaatt

SEQ ID NO: 1492 - DNA, 21 bp, synthetic construct
  source 1..21: mol_type = other DNA
  modified_base 1: mod_base = OTHER; note = uridine-3'-phosphate
  modified_base 2: mod_base = OTHER; note = cytidine-3'-phosphate
  modified_base 3: mod_base = OTHER; note = cytidine-3'-phosphate
  modified_base 4: mod_base = OTHER; note = cytidine-3'-phosphate
  modified_base 5: mod_base = OTHER; note = cytidine-3'-phosphate
  modified_base 6: mod_base = OTHER; note = cytidine-3'-phosphate
  modified_base 7: mod_base = OTHER; note = adenosine-3'-phosphate
  modified_base 8: mod_base = OTHER; note = guanosine-3'-phosphate
  modified_base 9: mod_base = OTHER; note = uridine-3'-phosphate
  modified_base 10: mod_base = OTHER; note = guanosine-3'-phosphate
  modified_base 11: mod_base = OTHER; note = cytidine-3'-phosphate
  modified_base 12: mod_base = OTHER; note = guanosine-3'-phosphate
  modified_base 13: mod_base = OTHER; note = guanosine-3'-phosphate
  modified_base 14: mod_base = OTHER; note = cytidine-3'-phosphate
  modified_base 15: mod_base = OTHER; note = cytidine-3'-phosphate
  modified_base 16: mod_base = OTHER; note = adenosine-3'-phosphate
  modified_base 17: mod_base = OTHER; note = guanosine-3'-phosphate
  modified_base 18: mod_base = OTHER; note = cytidine-3'-phosphate
  modified_base 19: mod_base = OTHER; note = uridine-3'-phosphate
  misc_feature 1..19: note = RNA
  misc_feature 20..21: note = DNA
tcccccagtgcggccagcttt

SEQ ID NO: 1493 - DNA, 21 bp, synthetic construct
  source 1..21: mol_type = other DNA
  modified_base 1: mod_base = OTHER; note = guanosine-3'-phosphate
  modified_base 2: mod_base = OTHER; note = cytidine-3'-phosphate
  modified_base 3: mod_base = OTHER; note = cytidine-3'-phosphate
  modified_base 4: mod_base = OTHER; note = adenosine-3'-phosphate
  modified_base 5: mod_base = OTHER; note = guanosine-3'-phosphate
  modified_base 6: mod_base = OTHER; note = cytidine-3'-phosphate
  modified_base 7: mod_base = OTHER; note = uridine-3'-phosphate
  modified_base 8: mod_base = OTHER; note = cytidine-3'-phosphate
  modified_base 9: mod_base = OTHER; note = cytidine-3'-phosphate
  modified_base 10: mod_base = OTHER; note = guanosine-3'-phosphate
  modified_base 11: mod_base = OTHER; note = cytidine-3'-phosphate
  modified_base 12: mod_base = OTHER; note = guanosine-3'-phosphate
  modified_base 13: mod_base = OTHER; note = cytidine-3'-phosphate
  modified_base 14: mod_base = OTHER; note = cytidine-3'-phosphate
  modified_base 15: mod_base = OTHER; note = adenosine-3'-phosphate
  modified_base 16: mod_base = OTHER; note = guanosine-3'-phosphate
  modified_base 17: mod_base = OTHER; note = guanosine-3'-phosphate
  modified_base 18: mod_base = OTHER; note = adenosine-3'-phosphate
  modified_base 19: mod_base = OTHER; note = uridine-3'-phosphate
  misc_feature 1..19: note = RNA
  misc_feature 20..21: note = DNA
gccagctccgcgccaggattt

SEQ ID NO: 1494 - DNA, 21 bp, synthetic construct
  source 1..21: mol_type = other DNA
  modified_base 1: mod_base = OTHER; note = guanosine-3'-phosphate
  modified_base 2: mod_base = OTHER; note = cytidine-3'-phosphate
  modified_base 3: mod_base = OTHER; note = cytidine-3'-phosphate
  modified_base 4: mod_base = OTHER; note = adenosine-3'-phosphate
  modified_base 5: mod_base = OTHER; note = guanosine-3'-phosphate
  modified_base 6: mod_base = OTHER; note = guanosine-3'-phosphate
  modified_base 7: mod_base = OTHER; note = adenosine-3'-phosphate
  modified_base 8: mod_base = OTHER; note = uridine-3'-phosphate
  modified_base 9: mod_base = OTHER; note = guanosine-3'-phosphate
  modified_base 10: mod_base = OTHER; note = guanosine-3'-phosphate
  modified_base 11: mod_base = OTHER; note = cytidine-3'-phosphate
  modified_base 12: mod_base = OTHER; note = guanosine-3'-phosphate
  modified_base 13: mod_base = OTHER; note = cytidine-3'-phosphate
  modified_base 14: mod_base = OTHER; note = adenosine-3'-phosphate
  modified_base 15: mod_base = OTHER; note = guanosine-3'-phosphate
  modified_base 16: mod_base = OTHER; note = guanosine-3'-phosphate
  modified_base 17: mod_base = OTHER; note = adenosine-3'-phosphate
  modified_base 18: mod_base = OTHER; note = adenosine-3'-phosphate
  modified_base 19: mod_base = OTHER; note = adenosine-3'-phosphate
  misc_feature 1..19: note = RNA
  misc_feature 20..21: note = DNA
gccaggatggcgcaggaaatt

SEQ ID NO: 1495 - DNA, 21 bp, synthetic construct
  source 1..21: mol_type = other DNA
  modified_base 1: mod_base = OTHER; note = guanosine-3'-phosphate
  modified_base 2: mod_base = OTHER; note = cytidine-3'-phosphate
  modified_base 3: mod_base = OTHER; note = adenosine-3'-phosphate
  modified_base 4: mod_base = OTHER; note = guanosine-3'-phosphate
  modified_base 5: mod_base = OTHER; note = guanosine-3'-phosphate
  modified_base 6: mod_base = OTHER; note = adenosine-3'-phosphate
  modified_base 7: mod_base = OTHER; note = adenosine-3'-phosphate
  modified_base 8: mod_base = OTHER; note = cytidine-3'-phosphate
  modified_base 9: mod_base = OTHER; note = uridine-3'-phosphate
  modified_base 10: mod_base = OTHER; note = cytidine-3'-phosphate
  modified_base 11: mod_base = OTHER; note = adenosine-3'-phosphate
  modified_base 12: mod_base = OTHER; note = adenosine-3'-phosphate
  modified_base 13: mod_base = OTHER; note = uridine-3'-phosphate
  modified_base 14: mod_base = OTHER; note = adenosine-3'-phosphate
  modified_base 15: mod_base = OTHER; note = adenosine-3'-phosphate
  modified_base 16: mod_base = OTHER; note = adenosine-3'-phosphate
  modified_base 17: mod_base = OTHER; note = guanosine-3'-phosphate
  modified_base 18: mod_base = OTHER; note = uridine-3'-phosphate
  modified_base 19: mod_base = OTHER; note = adenosine-3'-phosphate
  misc_feature 1..19: note = RNA
  misc_feature 20..21: note = DNA
gcaggaactcaataaagtatt

SEQ ID NO: 1496 - DNA, 21 bp, synthetic construct
  source 1..21: mol_type = other DNA
  modified_base 1: mod_base = OTHER; note = adenosine-3'-phosphate
  modified_base 2: mod_base = OTHER; note = adenosine-3'-phosphate
  modified_base 3: mod_base = OTHER; note = uridine-3'-phosphate
  modified_base 4: mod_base = OTHER; note = adenosine-3'-phosphate
  modified_base 5: mod_base = OTHER; note = adenosine-3'-phosphate
  modified_base 6: mod_base = OTHER; note = adenosine-3'-phosphate
  modified_base 7: mod_base = OTHER; note = guanosine-3'-phosphate
  modified_base 8: mod_base = OTHER; note = uridine-3'-phosphate
  modified_base 9: mod_base = OTHER; note = guanosine-3'-phosphate
  modified_base 10: mod_base = OTHER; note = cytidine-3'-phosphate
  modified_base 11: mod_base = OTHER; note = uridine-3'-phosphate
  modified_base 12: mod_base = OTHER; note = uridine-3'-phosphate
  modified_base 13: mod_base = OTHER; note = uridine-3'-phosphate
  modified_base 14: mod_base = OTHER; note = guanosine-3'-phosphate
  modified_base 15: mod_base = OTHER; note = adenosine-3'-phosphate
  modified_base 16: mod_base = OTHER; note = adenosine-3'-phosphate
  modified_base 17: mod_base = OTHER; note = adenosine-3'-phosphate
  modified_base 18: mod_base = OTHER; note = adenosine-3'-phosphate
  modified_base 19: mod_base = OTHER; note = uridine-3'-phosphate
  misc_feature 1..19: note = RNA
  misc_feature 20..21: note = DNA
aataaagtgctttgaaaattt

SEQ ID NO: 1497 - DNA, 21 bp, synthetic construct
  source 1..21: mol_type = other DNA
  modified_base 1: mod_base = OTHER; note = uridine-3'-phosphate
  modified_base 2: mod_base = OTHER; note = uridine-3'-phosphate
  modified_base 3: mod_base = OTHER; note = guanosine-3'-phosphate
  modified_base 4: mod_base = OTHER; note = adenosine-3'-phosphate
  modified_base 5: mod_base = OTHER; note = adenosine-3'-phosphate
  modified_base 6: mod_base = OTHER; note = adenosine-3'-phosphate
  modified_base 7: mod_base = OTHER; note = adenosine-3'-phosphate
  modified_base 8: mod_base = OTHER; note = uridine-3'-phosphate
  modified_base 9: mod_base = OTHER; note = guanosine-3'-phosphate
  modified_base 10: mod_base = OTHER; note = cytidine-3'-phosphate
  modified_base 11: mod_base = OTHER; note = uridine-3'-phosphate
  modified_base 12: mod_base = OTHER; note = guanosine-3'-phosphate
  modified_base 13: mod_base = OTHER; note = adenosine-3'-phosphate
  modified_base 14: mod_base = OTHER; note = guanosine-3'-phosphate
  modified_base 15: mod_base = OTHER; note = adenosine-3'-phosphate
  modified_base 16: mod_base = OTHER; note = adenosine-3'-phosphate
  modified_base 17: mod_base = OTHER; note = adenosine-3'-phosphate
  modified_base 18: mod_base = OTHER; note = adenosine-3'-phosphate
  modified_base 19: mod_base = OTHER; note = adenosine-3'-phosphate
  misc_feature 1..19: note = RNA
  misc_feature 20..21: note = DNA
ttgaaaatgctgagaaaaatt

SEQ ID NO: 1498 - DNA, 21 bp, synthetic construct
  source 1..21: mol_type = other DNA
  modified_base 1: mod_base = OTHER; note = adenosine-3'-phosphate
  modified_base 2: mod_base = OTHER; note = guanosine-3'-phosphate
  modified_base 3: mod_base = OTHER; note = cytidine-3'-phosphate
  modified_base 4: mod_base = OTHER; note = uridine-3'-phosphate
  modified_base 5: mod_base = OTHER; note = guanosine-3'-phosphate
  modified_base 6: mod_base = OTHER; note = cytidine-3'-phosphate
  modified_base 7: mod_base = OTHER; note = cytidine-3'-phosphate
  modified_base 8: mod_base = OTHER; note = uridine-3'-phosphate
  modified_base 9: mod_base = OTHER; note = adenosine-3'-phosphate
  modified_base 10: mod_base = OTHER; note = uridine-3'-phosphate
  modified_base 11: mod_base = OTHER; note = cytidine-3'-phosphate
  modified_base 12: mod_base = OTHER; note = cytidine-3'-phosphate
  modified_base 13: mod_base = OTHER; note = adenosine-3'-phosphate
  modified_base 14: mod_base = OTHER; note = guanosine-3'-phosphate
  modified_base 15: mod_base = OTHER; note = guanosine-3'-phosphate
  modified_base 16: mod_base = OTHER; note = adenosine-3'-phosphate
  modified_base 17: mod_base = OTHER; note = guanosine-3'-phosphate
  modified_base 18: mod_base = OTHER; note = uridine-3'-phosphate
  modified_base 19: mod_base = OTHER; note = cytidine-3'-phosphate
  misc_feature 1..19: note = RNA
  misc_feature 20..21: note = DNA
agctgcctatccaggagtctt

SEQ ID NO: 1499 - DNA, 21 bp, synthetic construct
  source 1..21: mol_type = other DNA
  modified_base 1: mod_base = OTHER; note = uridine-3'-phosphate
  modified_base 2: mod_base = OTHER; note = cytidine-3'-phosphate
  modified_base 3: mod_base = OTHER; note = guanosine-3'-phosphate
  modified_base 4: mod_base = OTHER; note = uridine-3'-phosphate
  modified_base 5: mod_base = OTHER; note = uridine-3'-phosphate
  modified_base 6: mod_base = OTHER; note = guanosine-3'-phosphate
  modified_base 7: mod_base = OTHER; note = guanosine-3'-phosphate
  modified_base 8: mod_base = OTHER; note = uridine-3'-phosphate
  modified_base 9: mod_base = OTHER; note = cytidine-3'-phosphate
  modified_base 10: mod_base = OTHER; note = cytidine-3'-phosphate
  modified_base 11: mod_base = OTHER; note = adenosine-3'-phosphate
  modified_base 12: mod_base = OTHER; note = guanosine-3'-phosphate
  modified_base 13: mod_base = OTHER; note = cytidine-3'-phosphate
  modified_base 14: mod_base = OTHER; note = uridine-3'-phosphate
  modified_base 15: mod_base = OTHER; note = guanosine-3'-phosphate
  modified_base 16: mod_base = OTHER; note = cytidine-3'-phosphate
  modified_base 17: mod_base = OTHER; note = cytidine-3'-phosphate
  modified_base 18: mod_base = OTHER; note = uridine-3'-phosphate
  modified_base 19: mod_base = OTHER; note = adenosine-3'-phosphate
  misc_feature 1..19: note = RNA
  misc_feature 20..21: note = DNA
tcgttggtccagctgcctatt

SEQ ID NO: 1500 - DNA, 21 bp, synthetic construct
  source 1..21: mol_type = other DNA
  modified_base 1: mod_base = OTHER; note = adenosine-3'-phosphate
  modified_base 2: mod_base = OTHER; note = uridine-3'-phosphate
  modified_base 3: mod_base = OTHER; note = guanosine-3'-phosphate
  modified_base 4: mod_base = OTHER; note = guanosine-3'-phosphate
  modified_base 5: mod_base = OTHER; note = cytidine-3'-phosphate
  modified_base 6: mod_base = OTHER; note = adenosine-3'-phosphate
  modified_base 7: mod_base = OTHER; note = uridine-3'-phosphate
  modified_base 8: mod_base = OTHER; note = cytidine-3'-phosphate
  modified_base 9: mod_base = OTHER; note = cytidine-3'-phosphate
  modified_base 10: mod_base = OTHER; note = guanosine-3'-phosphate
  modified_base 11: mod_base = OTHER; note = uridine-3'-phosphate
  modified_base 12: mod_base = OTHER; note = cytidine-3'-phosphate
  modified_base 13: mod_base = OTHER; note = cytidine-3'-phosphate
  modified_base 14: mod_base = OTHER; note = guanosine-3'-phosphate
  modified_base 15: mod_base = OTHER; note = uridine-3'-phosphate
  modified_base 16: mod_base = OTHER; note = uridine-3'-phosphate
  modified_base 17: mod_base = OTHER; note = guanosine-3'-phosphate
  modified_base 18: mod_base = OTHER; note = guanosine-3'-phosphate
  modified_base 19: mod_base = OTHER; note = uridine-3'-phosphate
  misc_feature 1..19: note = RNA
  misc_feature 20..21: note = DNA
atggcatccgtccgttggttt

SEQ ID NO: 1501 - DNA, 21 bp, synthetic construct
  source 1..21: mol_type = other DNA
  modified_base 1: mod_base = OTHER; note = adenosine-3'-phosphate
  modified_base 2: mod_base = OTHER; note = guanosine-3'-phosphate
  modified_base 3: mod_base = OTHER; note = cytidine-3'-phosphate
  modified_base 4: mod_base = OTHER; note = adenosine-3'-phosphate
  modified_base 5: mod_base = OTHER; note = guanosine-3'-phosphate
  modified_base 6: mod_base = OTHER; note = adenosine-3'-phosphate
  modified_base 7: mod_base = OTHER; note = guanosine-3'-phosphate
  modified_base 8: mod_base = OTHER; note = cytidine-3'-phosphate
  modified_base 9: mod_base = OTHER; note = cytidine-3'-phosphate
  modified_base 10: mod_base = OTHER; note = cytidine-3'-phosphate
  modified_base 11: mod_base = OTHER; note = uridine-3'-phosphate
  modified_base 12: mod_base = OTHER; note = cytidine-3'-phosphate
  modified_base 13: mod_base = OTHER; note = adenosine-3'-phosphate
  modified_base 14: mod_base = OTHER; note = uridine-3'-phosphate
  modified_base 15: mod_base = OTHER; note = guanosine-3'-phosphate
  modified_base 16: mod_base = OTHER; note = guanosine-3'-phosphate
  modified_base 17: mod_base = OTHER; note = cytidine-3'-phosphate
  modified_base 18: mod_base = OTHER; note = adenosine-3'-phosphate
  modified_base 19: mod_base = OTHER; note = uridine-3'-phosphate
  misc_feature 1..19: note = RNA
  misc_feature 20..21: note = DNA
agcagagccctcatggcattt

SEQ ID NO: 1502 - DNA, 21 bp, synthetic construct
  source 1..21: mol_type = other DNA
  modified_base 1: mod_base = OTHER; note = adenosine-3'-phosphate
  modified_base 2: mod_base = OTHER; note = cytidine-3'-phosphate
  modified_base 3: mod_base = OTHER; note = cytidine-3'-phosphate
  modified_base 4: mod_base = OTHER; note = cytidine-3'-phosphate
  modified_base 5: mod_base = OTHER; note = cytidine-3'-phosphate
  modified_base 6: mod_base = OTHER; note = adenosine-3'-phosphate
  modified_base 7: mod_base = OTHER; note = guanosine-3'-phosphate
  modified_base 8: mod_base = OTHER; note = guanosine-3'-phosphate
  modified_base 9: mod_base = OTHER; note = adenosine-3'-phosphate
  modified_base 10: mod_base = OTHER; note = guanosine-3'-phosphate
  modified_base 11: mod_base = OTHER; note = cytidine-3'-phosphate
  modified_base 12: mod_base = OTHER; note = adenosine-3'-phosphate
  modified_base 13: mod_base = OTHER; note = guanosine-3'-phosphate
  modified_base 14: mod_base = OTHER; note = cytidine-3'-phosphate
  modified_base 15: mod_base = OTHER; note = adenosine-3'-phosphate
  modified_base 16: mod_base = OTHER; note = guanosine-3'-phosphate
  modified_base 17: mod_base = OTHER; note = adenosine-3'-phosphate
  modified_base 18: mod_base = OTHER; note = guanosine-3'-phosphate
  modified_base 19: mod_base = OTHER; note = cytidine-3'-phosphate
  misc_feature 1..19: note = RNA
  misc_feature 20..21: note = DNA
accccaggagcagcagagctt

SEQ ID NO: 1503 - DNA, 21 bp, synthetic construct
  source 1..21: mol_type = other DNA
  modified_base 1: mod_base = OTHER; note = adenosine-3'-phosphate
  modified_base 2: mod_base = OTHER; note = cytidine-3'-phosphate
  modified_base 3: mod_base = OTHER; note = cytidine-3'-phosphate
  modified_base 4: mod_base = OTHER; note = adenosine-3'-phosphate
  modified_base 5: mod_base = OTHER; note = guanosine-3'-phosphate
  modified_base 6: mod_base = OTHER; note = cytidine-3'-phosphate
  modified_base 7: mod_base = OTHER; note = adenosine-3'-phosphate
  modified_base 8: mod_base = OTHER; note = guanosine-3'-phosphate
  modified_base 9: mod_base = OTHER; note = guanosine-3'-phosphate
  modified_base 10: mod_base = OTHER; note = adenosine-3'-phosphate
  modified_base 11: mod_base = OTHER; note = adenosine-3'-phosphate
  modified_base 12: mod_base = OTHER; note = cytidine-3'-phosphate
  modified_base 13: mod_base = OTHER; note = cytidine-3'-phosphate
  modified_base 14: mod_base = OTHER; note = cytidine-3'-phosphate
  modified_base 15: mod_base = OTHER; note = cytidine-3'-phosphate
  modified_base 16: mod_base = OTHER; note = adenosine-3'-phosphate
  modified_base 17: mod_base = OTHER; note = guanosine-3'-phosphate
  modified_base 18: mod_base = OTHER; note = guanosine-3'-phosphate
  modified_base 19: mod_base = OTHER; note = adenosine-3'-phosphate
  misc_feature 1..19: note = RNA
  misc_feature 20..21: note = DNA
accagcaggaaccccaggatt

SEQ ID NO: 1504 - DNA, 21 bp, synthetic construct
  source 1..21: mol_type = other DNA
  modified_base 1: mod_base = OTHER; note = adenosine-3'-phosphate
  modified_base 2: mod_base = OTHER; note = cytidine-3'-phosphate
  modified_base 3: mod_base = OTHER; note = uridine-3'-phosphate
  modified_base 4: mod_base = OTHER; note = cytidine-3'-phosphate
  modified_base 5: mod_base = OTHER; note = cytidine-3'-phosphate
  modified_base 6: mod_base = OTHER; note = adenosine-3'-phosphate
  modified_base 7: mod_base = OTHER; note = adenosine-3'-phosphate
  modified_base 8: mod_base = OTHER; note = guanosine-3'-phosphate
  modified_base 9: mod_base = OTHER; note = cytidine-3'-phosphate
  modified_base 10: mod_base = OTHER; note = uridine-3'-phosphate
  modified_base 11: mod_base = OTHER; note = cytidine-3'-phosphate
  modified_base 12: mod_base = OTHER; note = adenosine-3'-phosphate
  modified_base 13: mod_base = OTHER; note = cytidine-3'-phosphate
  modified_base 14: mod_base = OTHER; note = cytidine-3'-phosphate
  modified_base 15: mod_base = OTHER; note = adenosine-3'-phosphate
  modified_base 16: mod_base = OTHER; note = guanosine-3'-phosphate
  modified_base 17: mod_base = OTHER; note = cytidine-3'-phosphate
  modified_base 18: mod_base = OTHER; note = adenosine-3'-phosphate
  modified_base 19: mod_base = OTHER; note = guanosine-3'-phosphate
  misc_feature 1..19: note = RNA
  misc_feature 20..21: note = DNA
actccaagctcaccagcagtt

SEQ ID NO: 1505 - DNA, 21 bp, synthetic construct
  source 1..21: mol_type = other DNA
  modified_base 1: mod_base = OTHER; note = uridine-3'-phosphate
  modified_base 2: mod_base = OTHER; note = guanosine-3'-phosphate
  modified_base 3: mod_base = OTHER; note = adenosine-3'-phosphate
  modified_base 4: mod_base = OTHER; note = adenosine-3'-phosphate
  modified_base 5: mod_base = OTHER; note = adenosine-3'-phosphate
  modified_base 6: mod_base = OTHER; note = guanosine-3'-phosphate
  modified_base 7: mod_base = OTHER; note = uridine-3'-phosphate
  modified_base 8: mod_base = OTHER; note = guanosine-3'-phosphate
  modified_base 9: mod_base = OTHER; note = uridine-3'-phosphate
  modified_base 10: mod_base = OTHER; note = uridine-3'-phosphate
  modified_base 11: mod_base = OTHER; note = guanosine-3'-phosphate
  modified_base 12: mod_base = OTHER; note = adenosine-3'-phosphate
  modified_base 13: mod_base = OTHER; note = cytidine-3'-phosphate
  modified_base 14: mod_base = OTHER; note = uridine-3'-phosphate
  modified_base 15: mod_base = OTHER; note = cytidine-3'-phosphate
  modified_base 16: mod_base = OTHER; note = cytidine-3'-phosphate
  modified_base 17: mod_base = OTHER; note = adenosine-3'-phosphate
  modified_base 18: mod_base = OTHER; note = adenosine-3'-phosphate
  modified_base 19: mod_base = OTHER; note = guanosine-3'-phosphate
  misc_feature 1..19: note = RNA
  misc_feature 20..21: note = DNA
tgaaagtgttgactccaagtt

SEQ ID NO: 1506 - DNA, 21 bp, synthetic construct
  source 1..21: mol_type = other DNA
  modified_base 1: mod_base = OTHER; note = uridine-3'-phosphate
  modified_base 2: mod_base = OTHER; note = cytidine-3'-phosphate
  modified_base 3: mod_base = OTHER; note = adenosine-3'-phosphate
  modified_base 4: mod_base = OTHER; note = adenosine-3'-phosphate
  modified_base 5: mod_base = OTHER; note = guanosine-3'-phosphate
  modified_base 6: mod_base = OTHER; note = guanosine-3'-phosphate
  modified_base 7: mod_base = OTHER; note = uridine-3'-phosphate
  modified_base 8: mod_base = OTHER; note = guanosine-3'-phosphate
  modified_base 9: mod_base = OTHER; note = guanosine-3'-phosphate
  modified_base 10: mod_base = OTHER; note = adenosine-3'-phosphate
  modified_base 11: mod_base = OTHER; note = adenosine-3'-phosphate
  modified_base 12: mod_base = OTHER; note = uridine-3'-phosphate
  modified_base 13: mod_base = OTHER; note = cytidine-3'-phosphate
  modified_base 14: mod_base = OTHER; note = guanosine-3'-phosphate
  modified_base 15: mod_base = OTHER; note = adenosine-3'-phosphate
  modified_base 16: mod_base = OTHER; note = adenosine-3'-phosphate
  modified_base 17: mod_base = OTHER; note = adenosine-3'-phosphate
  modified_base 18: mod_base = OTHER; note = guanosine-3'-phosphate
  modified_base 19: mod_base = OTHER; note = uridine-3'-phosphate
  misc_feature 1..19: note = RNA
  misc_feature 20..21: note = DNA
tcaaggtggaatcgaaagttt

SEQ ID NO: 1507 - DNA, 21 bp, synthetic construct
  source 1..21: mol_type = other DNA
  modified_base 1: mod_base = OTHER; note = uridine-3'-phosphate
  modified_base 2: mod_base = OTHER; note = guanosine-3'-phosphate
  modified_base 3: mod_base = OTHER; note = guanosine-3'-phosphate
  modified_base 4: mod_base = OTHER; note = guanosine-3'-phosphate
  modified_base 5: mod_base = OTHER; note = guanosine-3'-phosphate
  modified_base 6: mod_base = OTHER; note = guanosine-3'-phosphate
  modified_base 7: mod_base = OTHER; note = cytidine-3'-phosphate
  modified_base 8: mod_base = OTHER; note = uridine-3'-phosphate
  modified_base 9: mod_base = OTHER; note = uridine-3'-phosphate
  modified_base 10: mod_base = OTHER; note = cytidine-3'-phosphate
  modified_base 11: mod_base = OTHER; note = cytidine-3'-phosphate
  modified_base 12: mod_base = OTHER; note = cytidine-3'-phosphate
  modified_base 13: mod_base = OTHER; note = adenosine-3'-phosphate
  modified_base 14: mod_base = OTHER; note = adenosine-3'-phosphate
  modified_base 15: mod_base = OTHER; note = guanosine-3'-phosphate
  modified_base 16: mod_base = OTHER; note = guanosine-3'-phosphate
  modified_base 17: mod_base = OTHER; note = uridine-3'-phosphate
  modified_base 18: mod_base = OTHER; note = guanosine-3'-phosphate
  modified_base 19: mod_base = OTHER; note = guanosine-3'-phosphate
  misc_feature 1..19: note = RNA
  misc_feature 20..21: note = DNA
tgggggcttcccaaggtggtt

SEQ ID NO: 1508 - DNA, 21 bp, synthetic construct
  source 1..21: mol_type = other DNA
  modified_base 1: mod_base = OTHER; note = adenosine-3'-phosphate
  modified_base 2: mod_base = OTHER; note = cytidine-3'-phosphate
  modified_base 3: mod_base = OTHER; note = uridine-3'-phosphate
  modified_base 4: mod_base = OTHER; note = uridine-3'-phosphate
  modified_base 5: mod_base = OTHER; note = adenosine-3'-phosphate
  modified_base 6: mod_base = OTHER; note = uridine-3'-phosphate
  modified_base 7: mod_base = OTHER; note = guanosine-3'-phosphate
  modified_base 8: mod_base = OTHER; note = cytidine-3'-phosphate
  modified_base 9: mod_base = OTHER; note = uridine-3'-phosphate
  modified_base 10: mod_base = OTHER; note = cytidine-3'-phosphate
  modified_base 11: mod_base = OTHER; note = cytidine-3'-phosphate
  modified_base 12: mod_base = OTHER; note = uridine-3'-phosphate
  modified_base 13: mod_base = OTHER; note = uridine-3'-phosphate
  modified_base 14: mod_base = OTHER; note = guanosine-3'-phosphate
  modified_base 15: mod_base = OTHER; note = guanosine-3'-phosphate
  modified_base 16: mod_base = OTHER; note = guanosine-3'-phosphate
  modified_base 17: mod_base = OTHER; note = guanosine-3'-phosphate
  modified_base 18: mod_base = OTHER; note = guanosine-3'-phosphate
  modified_base 19: mod_base = OTHER; note = cytidine-3'-phosphate
  misc_feature 1..19: note = RNA
  misc_feature 20..21: note = DNA
acttatgctccttgggggctt

SEQ ID NO: 1509 - DNA, 21 bp, synthetic construct
  source 1..21: mol_type = other DNA
  modified_base 1: mod_base = OTHER; note = uridine-3'-phosphate
  modified_base 2: mod_base = OTHER; note = uridine-3'-phosphate
  modified_base 3: mod_base = OTHER; note = uridine-3'-phosphate
  modified_base 4: mod_base = OTHER; note = cytidine-3'-phosphate
  modified_base 5: mod_base = OTHER; note = adenosine-3'-phosphate
  modified_base 6: mod_base = OTHER; note = guanosine-3'-phosphate
  modified_base 7: mod_base = OTHER; note = cytidine-3'-phosphate
  modified_base 8: mod_base = OTHER; note = uridine-3'-phosphate
  modified_base 9: mod_base = OTHER; note = uridine-3'-phosphate
  modified_base 10: mod_base = OTHER; note = uridine-3'-phosphate
  modified_base 11: mod_base = OTHER; note = guanosine-3'-phosphate
  modified_base 12: mod_base = OTHER; note = uridine-3'-phosphate
  modified_base 13: mod_base = OTHER; note = adenosine-3'-phosphate
  modified_base 14: mod_base = OTHER; note = cytidine-3'-phosphate
  modified_base 15: mod_base = OTHER; note = uridine-3'-phosphate
  modified_base 16: mod_base = OTHER; note = uridine-3'-phosphate
  modified_base 17: mod_base = OTHER; note = adenosine-3'-phosphate
  modified_base 18: mod_base = OTHER; note = uridine-3'-phosphate
  modified_base 19: mod_base = OTHER; note = guanosine-3'-phosphate
  misc_feature 1..19: note = RNA
  misc_feature 20..21: note = DNA
tttcagctttgtacttatgtt

SEQ ID NO: 1510 - DNA, 21 bp, synthetic construct
  source 1..21: mol_type = other DNA
  modified_base 1: mod_base = OTHER; note = adenosine-3'-phosphate
  modified_base 2: mod_base = OTHER; note = cytidine-3'-phosphate
  modified_base 3: mod_base = OTHER; note = uridine-3'-phosphate
  modified_base 4: mod_base = OTHER; note = guanosine-3'-phosphate
  modified_base 5: mod_base = OTHER; note = uridine-3'-phosphate
  modified_base 6: mod_base = OTHER; note = guanosine-3'-phosphate
  modified_base 7: mod_base = OTHER; note = uridine-3'-phosphate
  modified_base 8: mod_base = OTHER; note = guanosine-3'-phosphate
  modified_base 9: mod_base = OTHER; note = cytidine-3'-phosphate
  modified_base 10: mod_base = OTHER; note = uridine-3'-phosphate
  modified_base 11: mod_base = OTHER; note = cytidine-3'-phosphate
  modified_base 12: mod_base = OTHER; note = uridine-3'-phosphate
  modified_base 13: mod_base = OTHER; note = uridine-3'-phosphate
  modified_base 14: mod_base = OTHER; note = cytidine-3'-phosphate
  modified_base 15: mod_base = OTHER; note = adenosine-3'-phosphate
  modified_base 16: mod_base = OTHER; note = guanosine-3'-phosphate
  modified_base 17: mod_base = OTHER; note = cytidine-3'-phosphate
  modified_base 18: mod_base = OTHER; note = uridine-3'-phosphate
  modified_base 19: mod_base = OTHER; note = uridine-3'-phosphate
  misc_feature 1..19: note = RNA
  misc_feature 20..21: note = DNA
actgtgtgctcttcagctttt

SEQ ID NO: 1511 - DNA, 21 bp, synthetic construct
  source 1..21: mol_type = other DNA
  modified_base 1: mod_base = OTHER; note = adenosine-3'-phosphate
  modified_base 2: mod_base = OTHER; note = cytidine-3'-phosphate
  modified_base 3: mod_base = OTHER; note = adenosine-3'-phosphate
  modified_base 4: mod_base = OTHER; note = guanosine-3'-phosphate
  modified_base 5: mod_base = OTHER; note = uridine-3'-phosphate
  modified_base 6: mod_base = OTHER; note = guanosine-3'-phosphate
  modified_base 7: mod_base = OTHER; note = adenosine-3'-phosphate
  modified_base 8: mod_base = OTHER; note = guanosine-3'-phosphate
  modified_base 9: mod_base = OTHER; note = adenosine-3'-phosphate
  modified_base 10: mod_base = OTHER; note = adenosine-3'-phosphate
  modified_base 11: mod_base = OTHER; note = cytidine-3'-phosphate
  modified_base 12: mod_base = OTHER; note = guanosine-3'-phosphate
  modified_base 13: mod_base = OTHER; note = adenosine-3'-phosphate
  modified_base 14: mod_base = OTHER; note = cytidine-3'-phosphate
  modified_base 15: mod_base = OTHER; note = uridine-3'-phosphate
  modified_base 16: mod_base = OTHER; note = guanosine-3'-phosphate
  modified_base 17: mod_base = OTHER; note = uridine-3'-phosphate
  modified_base 18: mod_base = OTHER; note = guanosine-3'-phosphate
  modified_base 19: mod_base = OTHER; note = uridine-3'-phosphate
  misc_feature 1..19: note = RNA
  misc_feature 20..21: note = DNA
acagtgagaacgactgtgttt

SEQ ID NO: 1512 - DNA, 21 bp, synthetic construct
  source 1..21: mol_type = other DNA
  modified_base 1: mod_base = OTHER; note = uridine-3'-phosphate
  modified_base 2: mod_base = OTHER; note = cytidine-3'-phosphate
  modified_base 3: mod_base = OTHER; note = cytidine-3'-phosphate
  modified_base 4: mod_base = OTHER; note = cytidine-3'-phosphate
  modified_base 5: mod_base = OTHER; note = cytidine-3'-phosphate
  modified_base 6: mod_base = OTHER; note = guanosine-3'-phosphate
  modified_base 7: mod_base = OTHER; note = guanosine-3'-phosphate
  modified_base 8: mod_base = OTHER; note = uridine-3'-phosphate
  modified_base 9: mod_base = OTHER; note = guanosine-3'-phosphate
  modified_base 10: mod_base = OTHER; note = adenosine-3'-phosphate
  modified_base 11: mod_base = OTHER; note = cytidine-3'-phosphate
  modified_base 12: mod_base = OTHER; note = adenosine-3'-phosphate
  modified_base 13: mod_base = OTHER; note = guanosine-3'-phosphate
  modified_base 14: mod_base = OTHER; note = uridine-3'-phosphate
  modified_base 15: mod_base = OTHER; note = guanosine-3'-phosphate
  modified_base 16: mod_base = OTHER; note = adenosine-3'-phosphate
  modified_base 17: mod_base = OTHER; note = guanosine-3'-phosphate
  modified_base 18: mod_base = OTHER; note = adenosine-3'-phosphate
  modified_base 19: mod_base = OTHER; note = adenosine-3'-phosphate
  misc_feature 1..19: note = RNA
  misc_feature 20..21: note = DNA
tccccggtgacagtgagaatt

SEQ ID NO: 1513 - DNA, 21 bp, synthetic construct
  source 1..21: mol_type = other DNA
  modified_base 1: mod_base = OTHER; note = adenosine-3'-phosphate
  modified_base 2: mod_base = OTHER; note = guanosine-3'-phosphate
  modified_base 3: mod_base = OTHER; note = uridine-3'-phosphate
  modified_base 4: mod_base = OTHER; note = guanosine-3'-phosphate
  modified_base 5: mod_base = OTHER; note = guanosine-3'-phosphate
  modified_base 6: mod_base = OTHER; note = cytidine-3'-phosphate
  modified_base 7: mod_base = OTHER; note = adenosine-3'-phosphate
  modified_base 8: mod_base = OTHER; note = guanosine-3'-phosphate
  modified_base 9: mod_base = OTHER; note = guanosine-3'-phosphate
  modified_base 10: mod_base = OTHER; note = guanosine-3'-phosphate
  modified_base 11: mod_base = OTHER; note = cytidine-3'-phosphate
  modified_base 12: mod_base = OTHER; note = uridine-3'-phosphate
  modified_base 13: mod_base = OTHER; note = cytidine-3'-phosphate
  modified_base 14: mod_base = OTHER; note = cytidine-3'-phosphate
  modified_base 15: mod_base = OTHER; note = cytidine-3'-phosphate
  modified_base 16: mod_base = OTHER; note = cytidine-3'-phosphate
  modified_base 17: mod_base = OTHER; note = guanosine-3'-phosphate
  modified_base 18: mod_base = OTHER; note = guanosine-3'-phosphate
  modified_base 19: mod_base = OTHER; note = uridine-3'-phosphate
  misc_feature 1..19: note = RNA
  misc_feature 20..21: note = DNA
agtggcagggctccccggttt

SEQ ID NO: 1514 - DNA, 21 bp, synthetic construct
  source 1..21: mol_type = other DNA
  modified_base 1: mod_base = OTHER; note = adenosine-3'-phosphate
  modified_base 2: mod_base = OTHER; note = cytidine-3'-phosphate
  modified_base 3: mod_base = OTHER; note = uridine-3'-phosphate
  modified_base 4: mod_base = OTHER; note = guanosine-3'-phosphate
  modified_base 5: mod_base = OTHER; note = guanosine-3'-phosphate
  modified_base 6: mod_base = OTHER; note = adenosine-3'-phosphate
  modified_base 7: mod_base = OTHER; note = adenosine-3'-phosphate
  modified_base 8: mod_base = OTHER; note = guanosine-3'-phosphate
  modified_base 9: mod_base = OTHER; note = guanosine-3'-phosphate
  modified_base 10: mod_base = OTHER; note = guanosine-3'-phosphate
  modified_base 11: mod_base = OTHER; note = guanosine-3'-phosphate
  modified_base 12: mod_base = OTHER; note = adenosine-3'-phosphate
  modified_base 13: mod_base = OTHER; note = adenosine-3'-phosphate
  modified_base 14: mod_base = OTHER; note = guanosine-3'-phosphate
  modified_base 15: mod_base = OTHER; note = uridine-3'-phosphate
  modified_base 16: mod_base = OTHER; note = guanosine-3'-phosphate
  modified_base 17: mod_base = OTHER; note = guanosine-3'-phosphate
  modified_base 18: mod_base = OTHER; note = cytidine-3'-phosphate
  modified_base 19: mod_base = OTHER; note = adenosine-3'-phosphate
  misc_feature 1..19: note = RNA
  misc_feature 20..21: note = DNA
actggaaggggaagtggcatt

SEQ ID NO: 1515 - DNA, 21 bp, synthetic construct
  source 1..21: mol_type = other DNA
  modified_base 1: mod_base = OTHER; note = uridine-3'-phosphate
  modified_base 2: mod_base = OTHER; note = cytidine-3'-phosphate
  modified_base 3: mod_base = OTHER; note = uridine-3'-phosphate
  modified_base 4: mod_base = OTHER; note = guanosine-3'-phosphate
  modified_base 5: mod_base = OTHER; note = cytidine-3'-phosphate
  modified_base 6: mod_base = OTHER; note = cytidine-3'-phosphate
  modified_base 7: mod_base = OTHER; note = guanosine-3'-phosphate
  modified_base 8: mod_base = OTHER; note = guanosine-3'-phosphate
  modified_base 9: mod_base = OTHER; note = uridine-3'-phosphate
  modified_base 10: mod_base = OTHER; note = guanosine-3'-phosphate
  modified_base 11: mod_base = OTHER; note = guanosine-3'-phosphate
  modified_base 12: mod_base = OTHER; note = uridine-3'-phosphate
  modified_base 13: mod_base = OTHER; note = adenosine-3'-phosphate
  modified_base 14: mod_base = OTHER; note = cytidine-3'-phosphate
  modified_base 15: mod_base = OTHER; note = uridine-3'-phosphate
  modified_base 16: mod_base = OTHER; note = guanosine-3'-phosphate
  modified_base 17: mod_base = OTHER; note = guanosine-3'-phosphate
  modified_base 18: mod_base = OTHER; note = adenosine-3'-phosphate
  modified_base 19: mod_base = OTHER; note = adenosine-3'-phosphate
  misc_feature 1..19: note = RNA
  misc_feature 20..21: note = DNA
tctgccggtggtactggaatt

SEQ ID NO: 1516 - DNA, 21 bp, synthetic construct
  source 1..21: mol_type = other DNA
  modified_base 1: mod_base = OTHER; note = uridine-3'-phosphate
  modified_base 2: mod_base = OTHER; note = uridine-3'-phosphate
  modified_base 3: mod_base = OTHER; note = guanosine-3'-phosphate
  modified_base 4: mod_base = OTHER; note = uridine-3'-phosphate
  modified_base 5: mod_base = OTHER; note = guanosine-3'-phosphate
  modified_base 6: mod_base = OTHER; note = guanosine-3'-phosphate
  modified_base 7: mod_base = OTHER; note = uridine-3'-phosphate
  modified_base 8: mod_base = OTHER; note = adenosine-3'-phosphate
  modified_base 9: mod_base = OTHER; note = cytidine-3'-phosphate
  modified_base 10: mod_base = OTHER; note = adenosine-3'-phosphate
  modified_base 11: mod_base = OTHER; note = guanosine-3'-phosphate
  modified_base 12: mod_base = OTHER; note = cytidine-3'-phosphate
  modified_base 13: mod_base = OTHER; note = uridine-3'-phosphate
  modified_base 14: mod_base = OTHER; note = guanosine-3'-phosphate
  modified_base 15: mod_base = OTHER; note = cytidine-3'-phosphate
  modified_base 16: mod_base = OTHER; note = cytidine-3'-phosphate
  modified_base 17: mod_base = OTHER; note = guanosine-3'-phosphate
  modified_base 18: mod_base = OTHER; note = guanosine-3'-phosphate
  modified_base 19: mod_base = OTHER; note = uridine-3'-phosphate
  misc_feature 1..19: note = RNA
  misc_feature 20..21: note = DNA
ttgtggtacagctgccggttt

SEQ ID NO: 1517 - DNA, 21 bp, synthetic construct
  source 1..21: mol_type = other DNA
  modified_base 1: mod_base = OTHER; note = uridine-3'-phosphate
  modified_base 2: mod_base = OTHER; note = guanosine-3'-phosphate
  modified_base 3: mod_base = OTHER; note = uridine-3'-phosphate
  modified_base 4: mod_base = OTHER; note = guanosine-3'-phosphate
  modified_base 5: mod_base = OTHER; note = guanosine-3'-phosphate
  modified_base 6: mod_base = OTHER; note = guanosine-3'-phosphate
  modified_base 7: mod_base = OTHER; note = uridine-3'-phosphate
  modified_base 8: mod_base = OTHER; note = adenosine-3'-phosphate
  modified_base 9: mod_base = OTHER; note = cytidine-3'-phosphate
  modified_base 10: mod_base = OTHER; note = adenosine-3'-phosphate
  modified_base 11: mod_base = OTHER; note = uridine-3'-phosphate
  modified_base 12: mod_base = OTHER; note = uridine-3'-phosphate
  modified_base 13: mod_base = OTHER; note = uridine-3'-phosphate
  modified_base 14: mod_base = OTHER; note = guanosine-3'-phosphate
  modified_base 15: mod_base = OTHER; note = uridine-3'-phosphate
  modified_base 16: mod_base = OTHER; note = guanosine-3'-phosphate
  modified_base 17: mod_base = OTHER; note = guanosine-3'-phosphate
  modified_base 18: mod_base = OTHER; note = uridine-3'-phosphate
  modified_base 19: mod_base = OTHER; note = adenosine-3'-phosphate
  misc_feature 1..19: note = RNA
  misc_feature 20..21: note = DNA
tgtgggtacatttgtggtatt

SEQ ID NO: 1518 - DNA, 21 bp, synthetic construct
  source 1..21: mol_type = other DNA
  modified_base 1: mod_base = OTHER; note = uridine-3'-phosphate
  modified_base 2: mod_base = OTHER; note = guanosine-3'-phosphate
  modified_base 3: mod_base = OTHER; note = guanosine-3'-phosphate
  modified_base 4: mod_base = OTHER; note = cytidine-3'-phosphate
  modified_base 5: mod_base = OTHER; note = cytidine-3'-phosphate
  modified_base 6: mod_base = OTHER; note = guanosine-3'-phosphate
  modified_base 7: mod_base = OTHER; note = guanosine-3'-phosphate
  modified_base 8: mod_base = OTHER; note = cytidine-3'-phosphate
  modified_base 9: mod_base = OTHER; note = cytidine-3'-phosphate
  modified_base 10: mod_base = OTHER; note = cytidine-3'-phosphate
  modified_base 11: mod_base = OTHER; note = uridine-3'-phosphate
  modified_base 12: mod_base = OTHER; note = uridine-3'-phosphate
  modified_base 13: mod_base = OTHER; note = guanosine-3'-phosphate
  modified_base 14: mod_base = OTHER; note = uridine-3'-phosphate
  modified_base 15: mod_base = OTHER; note = guanosine-3'-phosphate
  modified_base 16: mod_base = OTHER; note = guanosine-3'-phosphate
  modified_base 17: mod_base = OTHER; note = guanosine-3'-phosphate
  modified_base 18: mod_base = OTHER; note = uridine-3'-phosphate
  modified_base 19: mod_base = OTHER; note = adenosine-3'-phosphate
  misc_feature 1..19: note = RNA
  misc_feature 20..21: note = DNA
tggccggcccttgtgggtatt

SEQ ID NO: 1519 - DNA, 21 bp, synthetic construct
  source 1..21: mol_type = other DNA
  modified_base 1: mod_base = OTHER; note = uridine-3'-phosphate
  modified_base 2: mod_base = OTHER; note = guanosine-3'-phosphate
  modified_base 3: mod_base = OTHER; note = cytidine-3'-phosphate
  modified_base 4: mod_base = OTHER; note = uridine-3'-phosphate
  modified_base 5: mod_base = OTHER; note = guanosine-3'-phosphate
  modified_base 6: mod_base = OTHER; note = adenosine-3'-phosphate
  modified_base 7: mod_base = OTHER; note = guanosine-3'-phosphate
  modified_base 8: mod_base = OTHER; note = guanosine-3'-phosphate
  modified_base 9: mod_base = OTHER; note = guanosine-3'-phosphate
  modified_base 10: mod_base = OTHER; note = cytidine-3'-phosphate
  modified_base 11: mod_base = OTHER; note = cytidine-3'-phosphate
  modified_base 12: mod_base = OTHER; note = uridine-3'-phosphate
  modified_base 13: mod_base = OTHER; note = guanosine-3'-phosphate
  modified_base 14: mod_base = OTHER; note = guanosine-3'-phosphate
  modified_base 15: mod_base = OTHER; note = cytidine-3'-phosphate
  modified_base 16: mod_base = OTHER; note = cytidine-3'-phosphate
  modified_base 17: mod_base = OTHER; note = guanosine-3'-phosphate
  modified_base 18: mod_base = OTHER; note = guanosine-3'-phosphate
  modified_base 19: mod_base = OTHER; note = cytidine-3'-phosphate
  misc_feature 1..19: note = RNA
  misc_feature 20..21: note = DNA
tgctgagggcctggccggctt

SEQ ID NO: 1520 - DNA, 21 bp, synthetic construct
  source 1..21: mol_type = other DNA
  modified_base 1: mod_base = OTHER; note = uridine-3'-phosphate
  modified_base 2: mod_base = OTHER; note = uridine-3'-phosphate
  modified_base 3: mod_base = OTHER; note = adenosine-3'-phosphate
  modified_base 4: mod_base = OTHER; note = guanosine-3'-phosphate
  modified_base 5: mod_base = OTHER; note = cytidine-3'-phosphate
  modified_base 6: mod_base = OTHER; note = adenosine-3'-phosphate
  modified_base 7: mod_base = OTHER; note = cytidine-3'-phosphate
  modified_base 8: mod_base = OTHER; note = adenosine-3'-phosphate
  modified_base 9: mod_base = OTHER; note = cytidine-3'-phosphate
  modified_base 10: mod_base = OTHER; note = cytidine-3'-phosphate
  modified_base 11: mod_base = OTHER; note = adenosine-3'-phosphate
  modified_base 12: mod_base = OTHER; note = guanosine-3'-phosphate
  modified_base 13: mod_base = OTHER; note = guanosine-3'-phosphate
  modified_base 14: mod_base = OTHER; note = guanosine-3'-phosphate
  modified_base 15: mod_base = OTHER; note = cytidine-3'-phosphate
  modified_base 16: mod_base = OTHER; note = uridine-3'-phosphate
  modified_base 17: mod_base = OTHER; note = guanosine-3'-phosphate
  modified_base 18: mod_base = OTHER; note = adenosine-3'-phosphate
  modified_base 19: mod_base = OTHER; note = guanosine-3'-phosphate
  misc_feature 1..19: note = RNA
  misc_feature 20..21: note = DNA
ttagcacaccagggctgagtt

SEQ ID NO: 1521 - DNA, 21 bp, synthetic construct
  source 1..21: mol_type = other DNA
  modified_base 1: mod_base = OTHER; note = adenosine-3'-phosphate
  modified_base 2: mod_base = OTHER; note = guanosine-3'-phosphate
  modified_base 3: mod_base = OTHER; note = uridine-3'-phosphate
  modified_base 4: mod_base = OTHER; note = uridine-3'-phosphate
  modified_base 5: mod_base = OTHER; note = guanosine-3'-phosphate
  modified_base 6: mod_base = OTHER; note = guanosine-3'-phosphate
  modified_base 7: mod_base = OTHER; note = guanosine-3'-phosphate
  modified_base 8: mod_base = OTHER; note = guanosine-3'-phosphate
  modified_base 9: mod_base = OTHER; note = guanosine-3'-phosphate
  modified_base 10: mod_base = OTHER; note = uridine-3'-phosphate
  modified_base 11: mod_base = OTHER; note = guanosine-3'-phosphate
  modified_base 12: mod_base = OTHER; note = guanosine-3'-phosphate
  modified_base 13: mod_base = OTHER; note = uridine-3'-phosphate
  modified_base 14: mod_base = OTHER; note = adenosine-3'-phosphate
  modified_base 15: mod_base = OTHER; note = guanosine-3'-phosphate
  modified_base 16: mod_base = OTHER; note = cytidine-3'-phosphate
  modified_base 17: mod_base = OTHER; note = adenosine-3'-phosphate
  modified_base 18: mod_base = OTHER; note = cytidine-3'-phosphate
  modified_base 19: mod_base = OTHER; note = adenosine-3'-phosphate
  misc_feature 1..19: note = RNA
  misc_feature 20..21: note = DNA
agttgggggtggtagcacatt

SEQ ID NO: 1522 - DNA, 21 bp, synthetic construct
  source 1..21: mol_type = other DNA
  modified_base 1: mod_base = OTHER; note = uridine-3'-phosphate
  modified_base 2: mod_base = OTHER; note = cytidine-3'-phosphate
  modified_base 3: mod_base = OTHER; note = uridine-3'-phosphate
  modified_base 4: mod_base = OTHER; note = guanosine-3'-phosphate
  modified_base 5: mod_base = OTHER; note = adenosine-3'-phosphate
  modified_base 6: mod_base = OTHER; note = uridine-3'-phosphate
  modified_base 7: mod_base = OTHER; note = cytidine-3'-phosphate
  modified_base 8: mod_base = OTHER; note = adenosine-3'-phosphate
  modified_base 9: mod_base = OTHER; note = adenosine-3'-phosphate
  modified_base 10: mod_base = OTHER; note = adenosine-3'-phosphate
  modified_base 11: mod_base = OTHER; note = guanosine-3'-phosphate
  modified_base 12: mod_base = OTHER; note = uridine-3'-phosphate
  modified_base 13: mod_base = OTHER; note = uridine-3'-phosphate
  modified_base 14: mod_base = OTHER; note = guanosine-3'-phosphate
  modified_base 15: mod_base = OTHER; note = guanosine-3'-phosphate
  modified_base 16: mod_base = OTHER; note = guanosine-3'-phosphate
  modified_base 17: mod_base = OTHER; note = guanosine-3'-phosphate
  modified_base 18: mod_base = OTHER; note = guanosine-3'-phosphate
  modified_base 19: mod_base = OTHER; note = uridine-3'-phosphate
  misc_feature 1..19: note = RNA
  misc_feature 20..21: note = DNA
tctgatcaaagttgggggttt

SEQ ID NO: 1523 - DNA, 21 bp, synthetic construct
  source 1..21: mol_type = other DNA
  modified_base 1: mod_base = OTHER; note = uridine-3'-phosphate
  modified_base 2: mod_base = OTHER; note = cytidine-3'-phosphate
  modified_base 3: mod_base = OTHER; note = cytidine-3'-phosphate
  modified_base 4: mod_base = OTHER; note = cytidine-3'-phosphate
  modified_base 5: mod_base = OTHER; note = adenosine-3'-phosphate
  modified_base 6: mod_base = OTHER; note = uridine-3'-phosphate
  modified_base 7: mod_base = OTHER; note = cytidine-3'-phosphate
  modified_base 8: mod_base = OTHER; note = guanosine-3'-phosphate
  modified_base 9: mod_base = OTHER; note = cytidine-3'-phosphate
  modified_base 10: mod_base = OTHER; note = uridine-3'-phosphate
  modified_base 11: mod_base = OTHER; note = guanosine-3'-phosphate
  modified_base 12: mod_base = OTHER; note = guanosine-3'-phosphate
  modified_base 13: mod_base = OTHER; note = uridine-3'-phosphate
  modified_base 14: mod_base = OTHER; note = cytidine-3'-phosphate
  modified_base 15: mod_base = OTHER; note = cytidine-3'-phosphate
  modified_base 16: mod_base = OTHER; note = uridine-3'-phosphate
  modified_base 17: mod_base = OTHER; note = guanosine-3'-phosphate
  modified_base 18: mod_base = OTHER; note = adenosine-3'-phosphate
  modified_base 19: mod_base = OTHER; note = uridine-3'-phosphate
  misc_feature 1..19: note = RNA
  misc_feature 20..21: note = DNA
tcccatcgctggtcctgattt

SEQ ID NO: 1524 - DNA, 21 bp, synthetic construct
  source 1..21: mol_type = other DNA
  modified_base 1: mod_base = OTHER; note = adenosine-3'-phosphate
  modified_base 2: mod_base = OTHER; note = adenosine-3'-phosphate
  modified_base 3: mod_base = OTHER; note = adenosine-3'-phosphate
  modified_base 4: mod_base = OTHER; note = cytidine-3'-phosphate
  modified_base 5: mod_base = OTHER; note = adenosine-3'-phosphate
  modified_base 6: mod_base = OTHER; note = guanosine-3'-phosphate
  modified_base 7: mod_base = OTHER; note = uridine-3'-phosphate
  modified_base 8: mod_base = OTHER; note = adenosine-3'-phosphate
  modified_base 9: mod_base = OTHER; note = uridine-3'-phosphate
  modified_base 10: mod_base = OTHER; note = cytidine-3'-phosphate
  modified_base 11: mod_base = OTHER; note = cytidine-3'-phosphate
  modified_base 12: mod_base = OTHER; note = cytidine-3'-phosphate
  modified_base 13: mod_base = OTHER; note = cytidine-3'-phosphate
  modified_base 14: mod_base = OTHER; note = adenosine-3'-phosphate
  modified_base 15: mod_base = OTHER; note = uridine-3'-phosphate
  modified_base 16: mod_base = OTHER; note = cytidine-3'-phosphate
  modified_base 17: mod_base = OTHER; note = guanosine-3'-phosphate
  modified_base 18: mod_base = OTHER; note = cytidine-3'-phosphate
  modified_base 19: mod_base = OTHER; note = uridine-3'-phosphate
  misc_feature 1..19: note = RNA
  misc_feature 20..21: note = DNA
aaacagtatccccatcgcttt

SEQ ID NO: 1525 - DNA, 21 bp, synthetic construct
  source 1..21: mol_type = other DNA
  modified_base 1: mod_base = OTHER; note = uridine-3'-phosphate
  modified_base 2: mod_base = OTHER; note = cytidine-3'-phosphate
  modified_base 3: mod_base = OTHER; note = uridine-3'-phosphate
  modified_base 4: mod_base = OTHER; note = uridine-3'-phosphate
  modified_base 5: mod_base = OTHER; note = guanosine-3'-phosphate
  modified_base 6: mod_base = OTHER; note = guanosine-3'-phosphate
  modified_base 7: mod_base = OTHER; note = guanosine-3'-phosphate
  modified_base 8: mod_base = OTHER; note = cytidine-3'-phosphate
  modified_base 9: mod_base = OTHER; note = uridine-3'-phosphate
  modified_base 10: mod_base = OTHER; note = cytidine-3'-phosphate
  modified_base 11: mod_base = OTHER; note = cytidine-3'-phosphate
  modified_base 12: mod_base = OTHER; note = adenosine-3'-phosphate
  modified_base 13: mod_base = OTHER; note = adenosine-3'-phosphate
  modified_base 14: mod_base = OTHER; note = adenosine-3'-phosphate
  modified_base 15: mod_base = OTHER; note = cytidine-3'-phosphate
  modified_base 16: mod_base = OTHER; note = adenosine-3'-phosphate
  modified_base 17: mod_base = OTHER; note = guanosine-3'-phosphate
  modified_base 18: mod_base = OTHER; note = uridine-3'-phosphate
  modified_base 19: mod_base = OTHER; note = adenosine-3'-phosphate
  misc_feature 1..19: note = RNA
  misc_feature 20..21: note = DNA
tcttgggctccaaacagtatt

SEQ ID NO: 1526 - DNA, 21 bp, synthetic construct
  source 1..21: mol_type = other DNA
  modified_base 1: mod_base = OTHER; note = uridine-3'-phosphate
  modified_base 2: mod_base = OTHER; note = guanosine-3'-phosphate
  modified_base 3: mod_base = OTHER; note = guanosine-3'-phosphate
  modified_base 4: mod_base = OTHER; note = uridine-3'-phosphate
  modified_base 5: mod_base = OTHER; note = cytidine-3'-phosphate
  modified_base 6: mod_base = OTHER; note = uridine-3'-phosphate
  modified_base 7: mod_base = OTHER; note = uridine-3'-phosphate
  modified_base 8: mod_base = OTHER; note = uridine-3'-phosphate
  modified_base 9: mod_base = OTHER; note = cytidine-3'-phosphate
  modified_base 10: mod_base = OTHER; note = adenosine-3'-phosphate
  modified_base 11: mod_base = OTHER; note = cytidine-3'-phosphate
  modified_base 12: mod_base = OTHER; note = uridine-3'-phosphate
  modified_base 13: mod_base = OTHER; note = uridine-3'-phosphate
  modified_base 14: mod_base = OTHER; note = uridine-3'-phosphate
  modified_base 15: mod_base = OTHER; note = cytidine-3'-phosphate
  modified_base 16: mod_base = OTHER; note = uridine-3'-phosphate
  modified_base 17: mod_base = OTHER; note = uridine-3'-phosphate
  modified_base 18: mod_base = OTHER; note = guanosine-3'-phosphate
  modified_base 19: mod_base = OTHER; note = guanosine-3'-phosphate
  misc_feature 1..19: note = RNA
  misc_feature 20..21: note = DNA
tggtctttcactttcttggtt

SEQ ID NO: 1527 - DNA, 21 bp, synthetic construct
  source 1..21: mol_type = other DNA
  modified_base 1: mod_base = OTHER; note = guanosine-3'-phosphate
  modified_base 2: mod_base = OTHER; note = uridine-3'-phosphate
  modified_base 3: mod_base = OTHER; note = uridine-3'-phosphate
  modified_base 4: mod_base = OTHER; note = uridine-3'-phosphate
  modified_base 5: mod_base = OTHER; note = guanosine-3'-phosphate
  modified_base 6: mod_base = OTHER; note = cytidine-3'-phosphate
  modified_base 7: mod_base = OTHER; note = uridine-3'-phosphate
  modified_base 8: mod_base = OTHER; note = guanosine-3'-phosphate
  modified_base 9: mod_base = OTHER; note = cytidine-3'-phosphate
  modified_base 10: mod_base = OTHER; note = adenosine-3'-phosphate
  modified_base 11: mod_base = OTHER; note = guanosine-3'-phosphate
  modified_base 12: mod_base = OTHER; note = uridine-3'-phosphate
  modified_base 13: mod_base = OTHER; note = guanosine-3'-phosphate
  modified_base 14: mod_base = OTHER; note = guanosine-3'-phosphate
  modified_base 15: mod_base = OTHER; note = uridine-3'-phosphate
  modified_base 16: mod_base = OTHER; note = cytidine-3'-phosphate
  modified_base 17: mod_base = OTHER; note = uridine-3'-phosphate
  modified_base 18: mod_base = OTHER; note = uridine-3'-phosphate
  modified_base 19: mod_base = OTHER; note = uridine-3'-phosphate
  misc_feature 1..19: note = RNA
  misc_feature 20..21: note = DNA
gtttgctgcagtggtcttttt

SEQ ID NO: 1528 - DNA, 21 bp, synthetic construct
  source 1..21: mol_type = other DNA
  modified_base 1: mod_base = OTHER; note = adenosine-3'-phosphate
  modified_base 2: mod_base = OTHER; note = guanosine-3'-phosphate
  modified_base 3: mod_base = OTHER; note = guanosine-3'-phosphate
  modified_base 4: mod_base = OTHER; note = guanosine-3'-phosphate
  modified_base 5: mod_base = OTHER; note = guanosine-3'-phosphate
  modified_base 6: mod_base = OTHER; note = cytidine-3'-phosphate
  modified_base 7: mod_base = OTHER; note = uridine-3'-phosphate
  modified_base 8: mod_base = OTHER; note = guanosine-3'-phosphate
  modified_base 9: mod_base = OTHER; note = uridine-3'-phosphate
  modified_base 10: mod_base = OTHER; note = guanosine-3'-phosphate
  modified_base 11: mod_base = OTHER; note = uridine-3'-phosphate
  modified_base 12: mod_base = OTHER; note = uridine-3'-phosphate
  modified_base 13: mod_base = OTHER; note = uridine-3'-phosphate
  modified_base 14: mod_base = OTHER; note = guanosine-3'-phosphate
  modified_base 15: mod_base = OTHER; note = cytidine-3'-phosphate
  modified_base 16: mod_base = OTHER; note = uridine-3'-phosphate
  modified_base 17: mod_base = OTHER; note = guanosine-3'-phosphate
  modified_base 18: mod_base = OTHER; note = cytidine-3'-phosphate
  modified_base 19: mod_base = OTHER; note = adenosine-3'-phosphate
  misc_feature 1..19: note = RNA
  misc_feature 20..21: note = DNA
aggggctgtgtttgctgcatt

SEQ ID NO: 1529 - DNA, 21 bp, synthetic construct
  source 1..21: mol_type = other DNA
  modified_base 1: mod_base = OTHER; note = uridine-3'-phosphate
  modified_base 2: mod_base = OTHER; note = uridine-3'-phosphate
  modified_base 3: mod_base = OTHER; note = cytidine-3'-phosphate
  modified_base 4: mod_base = OTHER; note = cytidine-3'-phosphate
  modified_base 5: mod_base = OTHER; note = uridine-3'-phosphate
  modified_base 6: mod_base = OTHER; note = uridine-3'-phosphate
  modified_base 7: mod_base = OTHER; note = uridine-3'-phosphate
  modified_base 8: mod_base = OTHER; note = cytidine-3'-phosphate
  modified_base 9: mod_base = OTHER; note = uridine-3'-phosphate
  modified_base 10: mod_base = OTHER; note = guanosine-3'-phosphate
  modified_base 11: mod_base = OTHER; note = guanosine-3'-phosphate
  modified_base 12: mod_base = OTHER; note = cytidine-3'-phosphate
  modified_base 13: mod_base = OTHER; note = adenosine-3'-phosphate
  modified_base 14: mod_base = OTHER; note = guanosine-3'-phosphate
  modified_base 15: mod_base = OTHER; note = guanosine-3'-phosphate
  modified_base 16: mod_base = OTHER; note = guanosine-3'-phosphate
  modified_base 17: mod_base = OTHER; note = guanosine-3'-phosphate
  modified_base 18: mod_base = OTHER; note = cytidine-3'-phosphate
  modified_base 19: mod_base = OTHER; note = uridine-3'-phosphate
  misc_feature 1..19: note = RNA
  misc_feature 20..21: note = DNA
ttcctttctggcaggggcttt

SEQ ID NO: 1530 - DNA, 21 bp, synthetic construct
  source 1..21: mol_type = other DNA
  modified_base 1: mod_base = OTHER; note = adenosine-3'-phosphate
  modified_base 2: mod_base = OTHER; note = cytidine-3'-phosphate
  modified_base 3: mod_base = OTHER; note = adenosine-3'-phosphate
  modified_base 4: mod_base = OTHER; note = cytidine-3'-phosphate
  modified_base 5: mod_base = OTHER; note = adenosine-3'-phosphate
  modified_base 6: mod_base = OTHER; note = guanosine-3'-phosphate
  modified_base 7: mod_base = OTHER; note = guanosine-3'-phosphate
  modified_base 8: mod_base = OTHER; note = uridine-3'-phosphate
  modified_base 9: mod_base = OTHER; note = cytidine-3'-phosphate
  modified_base 10: mod_base = OTHER; note = cytidine-3'-phosphate
  modified_base 11: mod_base = OTHER; note = cytidine-3'-phosphate
  modified_base 12: mod_base = OTHER; note = uridine-3'-phosphate
  modified_base 13: mod_base = OTHER; note = cytidine-3'-phosphate
  modified_base 14: mod_base = OTHER; note = cytidine-3'-phosphate
  modified_base 15: mod_base = OTHER; note = uridine-3'-phosphate
  modified_base 16: mod_base = OTHER; note = uridine-3'-phosphate
  modified_base 17: mod_base = OTHER; note = uridine-3'-phosphate
  modified_base 18: mod_base = OTHER; note = cytidine-3'-phosphate
  modified_base 19: mod_base = OTHER; note = uridine-3'-phosphate
  misc_feature 1..19: note = RNA
  misc_feature 20..21: note = DNA
acacaggtccctcctttcttt

SEQ ID NO: 1531 - DNA, 21 bp, synthetic construct
  source 1..21: mol_type = other DNA
  modified_base 1: mod_base = OTHER; note = uridine-3'-phosphate
  modified_base 2: mod_base = OTHER; note = uridine-3'-phosphate
  modified_base 3: mod_base = OTHER; note = guanosine-3'-phosphate
  modified_base 4: mod_base = OTHER; note = guanosine-3'-phosphate
  modified_base 5: mod_base = OTHER; note = cytidine-3'-phosphate
  modified_base 6: mod_base = OTHER; note = adenosine-3'-phosphate
  modified_base 7: mod_base = OTHER; note = uridine-3'-phosphate
  modified_base 8: mod_base = OTHER; note = guanosine-3'-phosphate
  modified_base 9: mod_base = OTHER; note = uridine-3'-phosphate
  modified_base 10: mod_base = OTHER; note = uridine-3'-phosphate
  modified_base 11: mod_base = OTHER; note = cytidine-3'-phosphate
  modified_base 12: mod_base = OTHER; note = adenosine-3'-phosphate
  modified_base 13: mod_base = OTHER; note = cytidine-3'-phosphate
  modified_base 14: mod_base = OTHER; note = adenosine-3'-phosphate
  modified_base 15: mod_base = OTHER; note = cytidine-3'-phosphate
  modified_base 16: mod_base = OTHER; note = adenosine-3'-phosphate
  modified_base 17: mod_base = OTHER; note = guanosine-3'-phosphate
  modified_base 18: mod_base = OTHER; note = guanosine-3'-phosphate
  modified_base 19: mod_base = OTHER; note = uridine-3'-phosphate
  misc_feature 1..19: note = RNA
  misc_feature 20..21: note = DNA
ttggcatgttcacacaggttt

SEQ ID NO: 1532 - DNA, 21 bp, synthetic construct
  source 1..21: mol_type = other DNA
  modified_base 1: mod_base = OTHER; note = adenosine-3'-phosphate
  modified_base 2: mod_base = OTHER; note = guanosine-3'-phosphate
  modified_base 3: mod_base = OTHER; note = uridine-3'-phosphate
  modified_base 4: mod_base = OTHER; note = guanosine-3'-phosphate
  modified_base 5: mod_base = OTHER; note = guanosine-3'-phosphate
  modified_base 6: mod_base = OTHER; note = guanosine-3'-phosphate
  modified_base 7: mod_base = OTHER; note = guanosine-3'-phosphate
  modified_base 8: mod_base = OTHER; note = guanosine-3'-phosphate
  modified_base 9: mod_base = OTHER; note = cytidine-3'-phosphate
  modified_base 10: mod_base = OTHER; note = cytidine-3'-phosphate
  modified_base 11: mod_base = OTHER; note = guanosine-3'-phosphate
  modified_base 12: mod_base = OTHER; note = cytidine-3'-phosphate
  modified_base 13: mod_base = OTHER; note = uridine-3'-phosphate
  modified_base 14: mod_base = OTHER; note = uridine-3'-phosphate
  modified_base 15: mod_base = OTHER; note = guanosine-3'-phosphate
  modified_base 16: mod_base = OTHER; note = guanosine-3'-phosphate
  modified_base 17: mod_base = OTHER; note = cytidine-3'-phosphate
  modified_base 18: mod_base = OTHER; note = adenosine-3'-phosphate
  modified_base 19: mod_base = OTHER; note = uridine-3'-phosphate
  misc_feature 1..19: note = RNA
  misc_feature 20..21: note = DNA
agtgggggccgcttggcattt

SEQ ID NO: 1533 - DNA, 21 bp, synthetic construct
  source 1..21: mol_type = other DNA
  modified_base 1: mod_base = OTHER; note = uridine-3'-phosphate
  modified_base 2: mod_base = OTHER; note = guanosine-3'-phosphate
  modified_base 3: mod_base = OTHER; note = adenosine-3'-phosphate
  modified_base 4: mod_base = OTHER; note = cytidine-3'-phosphate
  modified_base 5: mod_base = OTHER; note = adenosine-3'-phosphate
  modified_base 6: mod_base = OTHER; note = guanosine-3'-phosphate
  modified_base 7: mod_base = OTHER; note = adenosine-3'-phosphate
  modified_base 8: mod_base = OTHER; note = guanosine-3'-phosphate
  modified_base 9: mod_base = OTHER; note = adenosine-3'-phosphate
  modified_base 10: mod_base = OTHER; note = cytidine-3'-phosphate
  modified_base 11: mod_base = OTHER; note = adenosine-3'-phosphate
  modified_base 12: mod_base = OTHER; note = guanosine-3'-phosphate
  modified_base 13: mod_base = OTHER; note = uridine-3'-phosphate
  modified_base 14: mod_base = OTHER; note = guanosine-3'-phosphate
  modified_base 15: mod_base = OTHER; note = guanosine-3'-phosphate
  modified_base 16: mod_base = OTHER; note = guanosine-3'-phosphate
  modified_base 17: mod_base = OTHER; note = guanosine-3'-phosphate
  modified_base 18: mod_base = OTHER; note = guanosine-3'-phosphate
  modified_base 19: mod_base = OTHER; note = cytidine-3'-phosphate
  misc_feature 1..19: note = RNA
  misc_feature 20..21: note = DNA
tgacagagacagtgggggctt

SEQ ID NO: 1534 - DNA, 21 bp, synthetic construct
  source 1..21: mol_type = other DNA
  modified_base 1: mod_base = OTHER; note = adenosine-3'-phosphate
  modified_base 2: mod_base = OTHER; note = guanosine-3'-phosphate
  modified_base 3: mod_base = OTHER; note = uridine-3'-phosphate
  modified_base 4: mod_base = OTHER; note = guanosine-3'-phosphate
  modified_base 5: mod_base = OTHER; note = guanosine-3'-phosphate
  modified_base 6: mod_base = OTHER; note = uridine-3'-phosphate
  modified_base 7: mod_base = OTHER; note = uridine-3'-phosphate
  modified_base 8: mod_base = OTHER; note = uridine-3'-phosphate
  modified_base 9: mod_base = OTHER; note = cytidine-3'-phosphate
  modified_base 10: mod_base = OTHER; note = cytidine-3'-phosphate
  modified_base 11: mod_base = OTHER; note = adenosine-3'-phosphate
  modified_base 12: mod_base = OTHER; note = guanosine-3'-phosphate
  modified_base 13: mod_base = OTHER; note = uridine-3'-phosphate
  modified_base 14: mod_base = OTHER; note = guanosine-3'-phosphate
  modified_base 15: mod_base = OTHER; note = adenosine-3'-phosphate
  modified_base 16: mod_base = OTHER; note = guanosine-3'-phosphate
  modified_base 17: mod_base = OTHER; note = guanosine-3'-phosphate
  modified_base 18: mod_base = OTHER; note = uridine-3'-phosphate
  modified_base 19: mod_base = OTHER; note = guanosine-3'-phosphate
  misc_feature 1..19: note = RNA
  misc_feature 20..21: note = DNA
agtggtttccagtgaggtgtt

SEQ ID NO: 1535 - DNA, 21 bp, synthetic construct
  source 1..21: mol_type = other DNA
  modified_base 1: mod_base = OTHER; note = uridine-3'-phosphate
  modified_base 2: mod_base = OTHER; note = cytidine-3'-phosphate
  modified_base 3: mod_base = OTHER; note = uridine-3'-phosphate
  modified_base 4: mod_base = OTHER; note = cytidine-3'-phosphate
  modified_base 5: mod_base = OTHER; note = uridine-3'-phosphate
  modified_base 6: mod_base = OTHER; note = uridine-3'-phosphate
  modified_base 7: mod_base = OTHER; note = uridine-3'-phosphate
  modified_base 8: mod_base = OTHER; note = cytidine-3'-phosphate
  modified_base 9: mod_base = OTHER; note = uridine-3'-phosphate
  modified_base 10: mod_base = OTHER; note = guanosine-3'-phosphate
  modified_base 11: mod_base = OTHER; note = guanosine-3'-phosphate
  modified_base 12: mod_base = OTHER; note = cytidine-3'-phosphate
  modified_base 13: mod_base = OTHER; note = adenosine-3'-phosphate
  modified_base 14: mod_base = OTHER; note = guanosine-3'-phosphate
  modified_base 15: mod_base = OTHER; note = uridine-3'-phosphate
  modified_base 16: mod_base = OTHER; note = guanosine-3'-phosphate
  modified_base 17: mod_base = OTHER; note = guanosine-3'-phosphate
  modified_base 18: mod_base = OTHER; note = uridine-3'-phosphate
  modified_base 19: mod_base = OTHER; note = uridine-3'-phosphate
  misc_feature 1..19: note = RNA
  misc_feature 20..21: note = DNA
tctctttctggcagtggtttt

SEQ ID NO: 1536 - DNA, 21 bp, synthetic construct
  source 1..21: mol_type = other DNA
  modified_base 1: mod_base = OTHER; note = uridine-3'-phosphate
  modified_base 2: mod_base = OTHER; note = adenosine-3'-phosphate
  modified_base 3: mod_base = OTHER; note = adenosine-3'-phosphate
  modified_base 4: mod_base = OTHER; note = adenosine-3'-phosphate
  modified_base 5: mod_base = OTHER; note = guanosine-3'-phosphate
  modified_base 6: mod_base = OTHER; note = cytidine-3'-phosphate
  modified_base 7: mod_base = OTHER; note = adenosine-3'-phosphate
  modified_base 8: mod_base = OTHER; note = cytidine-3'-phosphate
  modified_base 9: mod_base = OTHER; note = uridine-3'-phosphate
  modified_base 10: mod_base = OTHER; note = uridine-3'-phosphate
  modified_base 11: mod_base = OTHER; note = cytidine-3'-phosphate
  modified_base 12: mod_base = OTHER; note = uridine-3'-phosphate
  modified_base 13: mod_base = OTHER; note = cytidine-3'-phosphate
  modified_base 14: mod_base = OTHER; note = uridine-3'-phosphate
  modified_base 15: mod_base = OTHER; note = uridine-3'-phosphate
  modified_base 16: mod_base = OTHER; note = uridine-3'-phosphate
  modified_base 17: mod_base = OTHER; note = cytidine-3'-phosphate
  modified_base 18: mod_base = OTHER; note = uridine-3'-phosphate
  modified_base 19: mod_base = OTHER; note = guanosine-3'-phosphate
  misc_feature 1..19: note = RNA
  misc_feature 20..21: note = DNA
taaagcacttctctttctgtt

SEQ ID NO: 1537 - DNA, 21 bp, synthetic construct
  source 1..21: mol_type = other DNA
  modified_base 1: mod_base = OTHER; note = uridine-3'-phosphate
  modified_base 2: mod_base = OTHER; note = adenosine-3'-phosphate
  modified_base 3: mod_base = OTHER; note = adenosine-3'-phosphate
  modified_base 4: mod_base = OTHER; note = guanosine-3'-phosphate
  modified_base 5: mod_base = OTHER; note = cytidine-3'-phosphate
  modified_base 6: mod_base = OTHER; note = uridine-3'-phosphate
  modified_base 7: mod_base = OTHER; note = guanosine-3'-phosphate
  modified_base 8: mod_base = OTHER; note = adenosine-3'-phosphate
  modified_base 9: mod_base = OTHER; note = guanosine-3'-phosphate
  modified_base 10: mod_base = OTHER; note = guanosine-3'-phosphate
  modified_base 11: mod_base = OTHER; note = cytidine-3'-phosphate
  modified_base 12: mod_base = OTHER; note = uridine-3'-phosphate
  modified_base 13: mod_base = OTHER; note = cytidine-3'-phosphate
  modified_base 14: mod_base = OTHER; note = adenosine-3'-phosphate
  modified_base 15: mod_base = OTHER; note = adenosine-3'-phosphate
  modified_base 16: mod_base = OTHER; note = adenosine-3'-phosphate
  modified_base 17: mod_base = OTHER; note = guanosine-3'-phosphate
  modified_base 18: mod_base = OTHER; note = cytidine-3'-phosphate
  modified_base 19: mod_base = OTHER; note = adenosine-3'-phosphate
  misc_feature 1..19: note = RNA
  misc_feature 20..21: note = DNA
taagctgaggctcaaagcatt

SEQ ID NO: 1538 - DNA, 21 bp, synthetic construct
  source 1..21: mol_type = other DNA
  modified_base 1: mod_base = OTHER; note = uridine-3'-phosphate
  modified_base 2: mod_base = OTHER; note = guanosine-3'-phosphate
  modified_base 3: mod_base = OTHER; note = adenosine-3'-phosphate
  modified_base 4: mod_base = OTHER; note = adenosine-3'-phosphate
  modified_base 5: mod_base = OTHER; note = adenosine-3'-phosphate
  modified_base 6: mod_base = OTHER; note = adenosine-3'-phosphate
  modified_base 7: mod_base = OTHER; note = adenosine-3'-phosphate
  modified_base 8: mod_base = OTHER; note = cytidine-3'-phosphate
  modified_base 9: mod_base = OTHER; note = cytidine-3'-phosphate
  modified_base 10: mod_base = OTHER; note = guanosine-3'-phosphate
  modified_base 11: mod_base = OTHER; note = guanosine-3'-phosphate
  modified_base 12: mod_base = OTHER; note = adenosine-3'-phosphate
  modified_base 13: mod_base = OTHER; note = guanosine-3'-phosphate
  modified_base 14: mod_base = OTHER; note = adenosine-3'-phosphate
  modified_base 15: mod_base = OTHER; note = adenosine-3'-phosphate
  modified_base 16: mod_base = OTHER; note = guanosine-3'-phosphate
  modified_base 17: mod_base = OTHER; note = cytidine-3'-phosphate
  modified_base 18: mod_base = OTHER; note = uridine-3'-phosphate
  modified_base 19: mod_base = OTHER; note = guanosine-3'-phosphate
  misc_feature 1..19: note = RNA
  misc_feature 20..21: note = DNA
tgaaaaaccggagaagctgtt

SEQ ID NO: 1539 - DNA, 21 bp, synthetic construct
  source 1..21: mol_type = other DNA
  modified_base 1: mod_base = OTHER; note = uridine-3'-phosphate
  modified_base 2: mod_base = OTHER; note = adenosine-3'-phosphate
  modified_base 3: mod_base = OTHER; note = uridine-3'-phosphate
  modified_base 4: mod_base = OTHER; note = uridine-3'-phosphate
  modified_base 5: mod_base = OTHER; note = cytidine-3'-phosphate
  modified_base 6: mod_base = OTHER; note = uridine-3'-phosphate
  modified_base 7: mod_base = OTHER; note = uridine-3'-phosphate
  modified_base 8: mod_base = OTHER; note = guanosine-3'-phosphate
  modified_base 9: mod_base = OTHER; note = uridine-3'-phosphate
  modified_base 10: mod_base = OTHER; note = guanosine-3'-phosphate
  modified_base 11: mod_base = OTHER; note = guanosine-3'-phosphate
  modified_base 12: mod_base = OTHER; note = adenosine-3'-phosphate
  modified_base 13: mod_base = OTHER; note = adenosine-3'-phosphate
  modified_base 14: mod_base = OTHER; note = adenosine-3'-phosphate
  modified_base 15: mod_base = OTHER; note = adenosine-3'-phosphate
  modified_base 16: mod_base = OTHER; note = adenosine-3'-phosphate
  modified_base 17: mod_base = OTHER; note = cytidine-3'-phosphate
  modified_base 18: mod_base = OTHER; note = cytidine-3'-phosphate
  modified_base 19: mod_base = OTHER; note = guanosine-3'-phosphate
  misc_feature 1..19: note = RNA
  misc_feature 20..21: note = DNA
tattcttgtggaaaaaccgtt

SEQ ID NO: 1540 - DNA, 21 bp, synthetic construct
  source 1..21: mol_type = other DNA
  modified_base 1: mod_base = OTHER; note = adenosine-3'-phosphate
  modified_base 2: mod_base = OTHER; note = uridine-3'-phosphate
  modified_base 3: mod_base = OTHER; note = adenosine-3'-phosphate
  modified_base 4: mod_base = OTHER; note = cytidine-3'-phosphate
  modified_base 5: mod_base = OTHER; note = cytidine-3'-phosphate
  modified_base 6: mod_base = OTHER; note = adenosine-3'-phosphate
  modified_base 7: mod_base = OTHER; note = uridine-3'-phosphate
  modified_base 8: mod_base = OTHER; note = adenosine-3'-phosphate
  modified_base 9: mod_base = OTHER; note = uridine-3'-phosphate
  modified_base 10: mod_base = OTHER; note = cytidine-3'-phosphate
  modified_base 11: mod_base = OTHER; note = uridine-3'-phosphate
  modified_base 12: mod_base = OTHER; note = cytidine-3'-phosphate
  modified_base 13: mod_base = OTHER; note = adenosine-3'-phosphate
  modified_base 14: mod_base = OTHER; note = uridine-3'-phosphate
  modified_base 15: mod_base = OTHER; note = uridine-3'-phosphate
  modified_base 16: mod_base = OTHER; note = cytidine-3'-phosphate
  modified_base 17: mod_base = OTHER; note = uridine-3'-phosphate
  modified_base 18: mod_base = OTHER; note = uridine-3'-phosphate
  modified_base 19: mod_base = OTHER; note = guanosine-3'-phosphate
  misc_feature 1..19: note = RNA
  misc_feature 20..21: note = DNA
ataccatatctcattcttgtt

SEQ ID NO: 1541 - DNA, 21 bp, synthetic construct
  source 1..21: mol_type = other DNA
  modified_base 1: mod_base = OTHER; note = uridine-3'-phosphate
  modified_base 2: mod_base = OTHER; note = guanosine-3'-phosphate
  modified_base 3: mod_base = OTHER; note = cytidine-3'-phosphate
  modified_base 4: mod_base = OTHER; note = uridine-3'-phosphate
  modified_base 5: mod_base = OTHER; note = cytidine-3'-phosphate
  modified_base 6: mod_base = OTHER; note = adenosine-3'-phosphate
  modified_base 7: mod_base = OTHER; note = guanosine-3'-phosphate
  modified_base 8: mod_base = OTHER; note = uridine-3'-phosphate
  modified_base 9: mod_base = OTHER; note = uridine-3'-phosphate
  modified_base 10: mod_base = OTHER; note = cytidine-3'-phosphate
  modified_base 11: mod_base = OTHER; note = uridine-3'-phosphate
  modified_base 12: mod_base = OTHER; note = adenosine-3'-phosphate
  modified_base 13: mod_base = OTHER; note = uridine-3'-phosphate
  modified_base 14: mod_base = OTHER; note = adenosine-3'-phosphate
  modified_base 15: mod_base = OTHER; note = cytidine-3'-phosphate
  modified_base 16: mod_base = OTHER; note = cytidine-3'-phosphate
  modified_base 17: mod_base = OTHER; note = adenosine-3'-phosphate
  modified_base 18: mod_base = OTHER; note = uridine-3'-phosphate
  modified_base 19: mod_base = OTHER; note = adenosine-3'-phosphate
  misc_feature 1..19: note = RNA
  misc_feature 20..21: note = DNA
tgctcagttctataccatatt

SEQ ID NO: 1542 - DNA, 21 bp, synthetic construct
  source 1..21: mol_type = other DNA
  modified_base 1: mod_base = OTHER; note = uridine-3'-phosphate
  modified_base 2: mod_base = OTHER; note = guanosine-3'-phosphate
  modified_base 3: mod_base = OTHER; note = cytidine-3'-phosphate
  modified_base 4: mod_base = OTHER; note = cytidine-3'-phosphate
  modified_base 5: mod_base = OTHER; note = adenosine-3'-phosphate
  modified_base 6: mod_base = OTHER; note = cytidine-3'-phosphate
  modified_base 7: mod_base = OTHER; note = adenosine-3'-phosphate
  modified_base 8: mod_base = OTHER; note = guanosine-3'-phosphate
  modified_base 9: mod_base = OTHER; note = cytidine-3'-phosphate
  modified_base 10: mod_base = OTHER; note = uridine-3'-phosphate
  modified_base 11: mod_base = OTHER; note = guanosine-3'-phosphate
  modified_base 12: mod_base = OTHER; note = cytidine-3'-phosphate
  modified_base 13: mod_base = OTHER; note = uridine-3'-phosphate
  modified_base 14: mod_base = OTHER; note = uridine-3'-phosphate
  modified_base 15: mod_base = OTHER; note = guanosine-3'-phosphate
  modified_base 16: mod_base = OTHER; note = cytidine-3'-phosphate
  modified_base 17: mod_base = OTHER; note = uridine-3'-phosphate
  modified_base 18: mod_base = OTHER; note = cytidine-3'-phosphate
  modified_base 19: mod_base = OTHER; note = adenosine-3'-phosphate
  misc_feature 1..19: note = RNA
  misc_feature 20..21: note = DNA
tgccacagctgcttgctcatt

SEQ ID NO: 1543 - DNA, 21 bp, synthetic construct
  source 1..21: mol_type = other DNA
  modified_base 1: mod_base = OTHER; note = adenosine-3'-phosphate
  modified_base 2: mod_base = OTHER; note = cytidine-3'-phosphate
  modified_base 3: mod_base = OTHER; note = uridine-3'-phosphate
  modified_base 4: mod_base = OTHER; note = guanosine-3'-phosphate
  modified_base 5: mod_base = OTHER; note = guanosine-3'-phosphate
  modified_base 6: mod_base = OTHER; note = cytidine-3'-phosphate
  modified_base 7: mod_base = OTHER; note = adenosine-3'-phosphate
  modified_base 8: mod_base = OTHER; note = uridine-3'-phosphate
  modified_base 9: mod_base = OTHER; note = cytidine-3'-phosphate
  modified_base 10: mod_base = OTHER; note = uridine-3'-phosphate
  modified_base 11: mod_base = OTHER; note = guanosine-3'-phosphate
  modified_base 12: mod_base = OTHER; note = guanosine-3'-phosphate
  modified_base 13: mod_base = OTHER; note = cytidine-3'-phosphate
  modified_base 14: mod_base = OTHER; note = cytidine-3'-phosphate
  modified_base 15: mod_base = OTHER; note = adenosine-3'-phosphate
  modified_base 16: mod_base = OTHER; note = cytidine-3'-phosphate
  modified_base 17: mod_base = OTHER; note = adenosine-3'-phosphate
  modified_base 18: mod_base = OTHER; note = guanosine-3'-phosphate
  modified_base 19: mod_base = OTHER; note = cytidine-3'-phosphate
  misc_feature 1..19: note = RNA
  misc_feature 20..21: note = DNA
actggcatctggccacagctt

SEQ ID NO: 1544 - DNA, 21 bp, synthetic construct
  source 1..21: mol_type = other DNA
  modified_base 1: mod_base = OTHER; note = adenosine-3'-phosphate
  modified_base 2: mod_base = OTHER; note = guanosine-3'-phosphate
  modified_base 3: mod_base = OTHER; note = guanosine-3'-phosphate
  modified_base 4: mod_base = OTHER; note = adenosine-3'-phosphate
  modified_base 5: mod_base = OTHER; note = cytidine-3'-phosphate
  modified_base 6: mod_base = OTHER; note = cytidine-3'-phosphate
  modified_base 7: mod_base = OTHER; note = cytidine-3'-phosphate
  modified_base 8: mod_base = OTHER; note = uridine-3'-phosphate
  modified_base 9: mod_base = OTHER; note = uridine-3'-phosphate
  modified_base 10: mod_base = OTHER; note = guanosine-3'-phosphate
  modified_base 11: mod_base = OTHER; note = cytidine-3'-phosphate
  modified_base 12: mod_base = OTHER; note = adenosine-3'-phosphate
  modified_base 13: mod_base = OTHER; note = cytidine-3'-phosphate
  modified_base 14: mod_base = OTHER; note = uridine-3'-phosphate
  modified_base 15: mod_base = OTHER; note = guanosine-3'-phosphate
  modified_base 16: mod_base = OTHER; note = guanosine-3'-phosphate
  modified_base 17: mod_base = OTHER; note = cytidine-3'-phosphate
  modified_base 18: mod_base = OTHER; note = adenosine-3'-phosphate
  modified_base 19: mod_base = OTHER; note = uridine-3'-phosphate
  misc_feature 1..19: note = RNA
  misc_feature 20..21: note = DNA
aggacccttgcactggcattt

SEQ ID NO: 1545 - DNA, 21 bp, synthetic construct
  source 1..21: mol_type = other DNA
  modified_base 1: mod_base = OTHER; note = adenosine-3'-phosphate
  modified_base 2: mod_base = OTHER; note = guanosine-3'-phosphate
  modified_base 3: mod_base = OTHER; note = uridine-3'-phosphate
  modified_base 4: mod_base = OTHER; note = guanosine-3'-phosphate
  modified_base 5: mod_base = OTHER; note = guanosine-3'-phosphate
  modified_base 6: mod_base = OTHER; note = guanosine-3'-phosphate
  modified_base 7: mod_base = OTHER; note = cytidine-3'-phosphate
  modified_base 8: mod_base = OTHER; note = adenosine-3'-phosphate
  modified_base 9: mod_base = OTHER; note = uridine-3'-phosphate
  modified_base 10: mod_base = OTHER; note = cytidine-3'-phosphate
  modified_base 11: mod_base = OTHER; note = adenosine-3'-phosphate
  modified_base 12: mod_base = OTHER; note = guanosine-3'-phosphate
  modified_base 13: mod_base = OTHER; note = guanosine-3'-phosphate
  modified_base 14: mod_base = OTHER; note = adenosine-3'-phosphate
  modified_base 15: mod_base = OTHER; note = cytidine-3'-phosphate
  modified_base 16: mod_base = OTHER; note = cytidine-3'-phosphate
  modified_base 17: mod_base = OTHER; note = cytidine-3'-phosphate
  modified_base 18: mod_base = OTHER; note = uridine-3'-phosphate
  modified_base 19: mod_base = OTHER; note = uridine-3'-phosphate
  misc_feature 1..19: note = RNA
  misc_feature 20..21: note = DNA
agtgggcatcaggaccctttt

SEQ ID NO: 1546 - DNA, 21 bp, synthetic construct
  source 1..21: mol_type = other DNA
  modified_base 1: mod_base = OTHER; note = uridine-3'-phosphate
  modified_base 2: mod_base = OTHER; note = adenosine-3'-phosphate
  modified_base 3: mod_base = OTHER; note = guanosine-3'-phosphate
  modified_base 4: mod_base = OTHER; note = cytidine-3'-phosphate
  modified_base 5: mod_base = OTHER; note = cytidine-3'-phosphate
  modified_base 6: mod_base = OTHER; note = guanosine-3'-phosphate
  modified_base 7: mod_base = OTHER; note = cytidine-3'-phosphate
  modified_base 8: mod_base = OTHER; note = uridine-3'-phosphate
  modified_base 9: mod_base = OTHER; note = guanosine-3'-phosphate
  modified_base 10: mod_base = OTHER; note = guanosine-3'-phosphate
  modified_base 11: mod_base = OTHER; note = cytidine-3'-phosphate
  modified_base 12: mod_base = OTHER; note = adenosine-3'-phosphate
  modified_base 13: mod_base = OTHER; note = guanosine-3'-phosphate
  modified_base 14: mod_base = OTHER; note = uridine-3'-phosphate
  modified_base 15: mod_base = OTHER; note = guanosine-3'-phosphate
  modified_base 16: mod_base = OTHER; note = guanosine-3'-phosphate
  modified_base 17: mod_base = OTHER; note = guanosine-3'-phosphate
  modified_base 18: mod_base = OTHER; note = cytidine-3'-phosphate
  modified_base 19: mod_base = OTHER; note = adenosine-3'-phosphate
  misc_feature 1..19: note = RNA
  misc_feature 20..21: note = DNA
tagccgctggcagtgggcatt

SEQ ID NO: 1547 - DNA, 21 bp, synthetic construct
  source 1..21: mol_type = other DNA
  modified_base 1: mod_base = OTHER; note = adenosine-3'-phosphate
  modified_base 2: mod_base = OTHER; note = guanosine-3'-phosphate
  modified_base 3: mod_base = OTHER; note = guanosine-3'-phosphate
  modified_base 4: mod_base = OTHER; note = cytidine-3'-phosphate
  modified_base 5: mod_base = OTHER; note = cytidine-3'-phosphate
  modified_base 6: mod_base = OTHER; note = uridine-3'-phosphate
  modified_base 7: mod_base = OTHER; note = guanosine-3'-phosphate
  modified_base 8: mod_base = OTHER; note = guanosine-3'-phosphate
  modified_base 9: mod_base = OTHER; note = cytidine-3'-phosphate
  modified_base 10: mod_base = OTHER; note = uridine-3'-phosphate
  modified_base 11: mod_base = OTHER; note = guanosine-3'-phosphate
  modified_base 12: mod_base = OTHER; note = guanosine-3'-phosphate
  modified_base 13: mod_base = OTHER; note = cytidine-3'-phosphate
  modified_base 14: mod_base = OTHER; note = cytidine-3'-phosphate
  modified_base 15: mod_base = OTHER; note = adenosine-3'-phosphate
  modified_base 16: mod_base = OTHER; note = guanosine-3'-phosphate
  modified_base 17: mod_base = OTHER; note = cytidine-3'-phosphate
  modified_base 18: mod_base = OTHER; note = cytidine-3'-phosphate
  modified_base 19: mod_base = OTHER; note = guanosine-3'-phosphate
  misc_feature 1..19: note = RNA
  misc_feature 20..21: note = DNA
aggcctggctggccagccgtt

SEQ ID NO: 1548 - DNA, 21 bp, synthetic construct
  source 1..21: mol_type = other DNA
  modified_base 1: mod_base = OTHER; note = uridine-3'-phosphate
  modified_base 2: mod_base = OTHER; note = guanosine-3'-phosphate
  modified_base 3: mod_base = OTHER; note = guanosine-3'-phosphate
  modified_base 4: mod_base = OTHER; note = uridine-3'-phosphate
  modified_base 5: mod_base = OTHER; note = guanosine-3'-phosphate
  modified_base 6: mod_base = OTHER; note = cytidine-3'-phosphate
  modified_base 7: mod_base = OTHER; note = guanosine-3'-phosphate
  modified_base 8: mod_base = OTHER; note = guanosine-3'-phosphate
  modified_base 9: mod_base = OTHER; note = cytidine-3'-phosphate
  modified_base 10: mod_base = OTHER; note = adenosine-3'-phosphate
  modified_base 11: mod_base = OTHER; note = guanosine-3'-phosphate
  modified_base 12: mod_base = OTHER; note = guanosine-3'-phosphate
  modified_base 13: mod_base = OTHER; note = cytidine-3'-phosphate
  modified_base 14: mod_base = OTHER; note = cytidine-3'-phosphate
  modified_base 15: mod_base = OTHER; note = uridine-3'-phosphate
  modified_base 16: mod_base = OTHER; note = guanosine-3'-phosphate
  modified_base 17: mod_base = OTHER; note = guanosine-3'-phosphate
  modified_base 18: mod_base = OTHER; note = cytidine-3'-phosphate
  modified_base 19: mod_base = OTHER; note = uridine-3'-phosphate
  misc_feature 1..19: note = RNA
  misc_feature 20..21: note = DNA
tggtgcggcaggcctggcttt

SEQ ID NO: 1549 - DNA, 21 bp, synthetic construct
  source 1..21: mol_type = other DNA
  modified_base 1: mod_base = OTHER; note = uridine-3'-phosphate
  modified_base 2: mod_base = OTHER; note = guanosine-3'-phosphate
  modified_base 3: mod_base = OTHER; note = adenosine-3'-phosphate
  modified_base 4: mod_base = OTHER; note = guanosine-3'-phosphate
  modified_base 5: mod_base = OTHER; note = guanosine-3'-phosphate
  modified_base 6: mod_base = OTHER; note = cytidine-3'-phosphate
  modified_base 7: mod_base = OTHER; note = adenosine-3'-phosphate
  modified_base 8: mod_base = OTHER; note = cytidine-3'-phosphate
  modified_base 9: mod_base = OTHER; note = guanosine-3'-phosphate
  modified_base 10: mod_base = OTHER; note = guanosine-3'-phosphate
  modified_base 11: mod_base = OTHER; note = guanosine-3'-phosphate
  modified_base 12: mod_base = OTHER; note = uridine-3'-phosphate
  modified_base 13: mod_base = OTHER; note = uridine-3'-phosphate
  modified_base 14: mod_base = OTHER; note = guanosine-3'-phosphate
  modified_base 15: mod_base = OTHER; note = guanosine-3'-phosphate
  modified_base 16: mod_base = OTHER; note = uridine-3'-phosphate
  modified_base 17: mod_base = OTHER; note = guanosine-3'-phosphate
  modified_base 18: mod_base = OTHER; note = cytidine-3'-phosphate
  modified_base 19: mod_base = OTHER; note = guanosine-3'-phosphate
  misc_feature 1..19: note = RNA
  misc_feature 20..21: note = DNA
tgaggcacgggttggtgcgtt

SEQ ID NO: 1550 - DNA, 21 bp, synthetic construct
  source 1..21: mol_type = other DNA
  modified_base 1: mod_base = OTHER; note = adenosine-3'-phosphate
  modified_base 2: mod_base = OTHER; note = guanosine-3'-phosphate
  modified_base 3: mod_base = OTHER; note = cytidine-3'-phosphate
  modified_base 4: mod_base = OTHER; note = guanosine-3'-phosphate
  modified_base 5: mod_base = OTHER; note = adenosine-3'-phosphate
  modified_base 6: mod_base = OTHER; note = cytidine-3'-phosphate
  modified_base 7: mod_base = OTHER; note = cytidine-3'-phosphate
  modified_base 8: mod_base = OTHER; note = cytidine-3'-phosphate
  modified_base 9: mod_base = OTHER; note = cytidine-3'-phosphate
  modified_base 10: mod_base = OTHER; note = cytidine-3'-phosphate
  modified_base 11: mod_base = OTHER; note = adenosine-3'-phosphate
  modified_base 12: mod_base = OTHER; note = uridine-3'-phosphate
  modified_base 13: mod_base = OTHER; note = guanosine-3'-phosphate
  modified_base 14: mod_base = OTHER; note = guanosine-3'-phosphate
  modified_base 15: mod_base = OTHER; note = adenosine-3'-phosphate
  modified_base 16: mod_base = OTHER; note = guanosine-3'-phosphate
  modified_base 17: mod_base = OTHER; note = guanosine-3'-phosphate
  modified_base 18: mod_base = OTHER; note = cytidine-3'-phosphate
  modified_base 19: mod_base = OTHER; note = adenosine-3'-phosphate
  misc_feature 1..19: note = RNA
  misc_feature 20..21: note = DNA
agcgacccccatggaggcatt

SEQ ID NO: 1551 - DNA, 21 bp, synthetic construct
  source 1..21: mol_type = other DNA
  modified_base 1: mod_base = OTHER; note = adenosine-3'-phosphate
  modified_base 2: mod_base = OTHER; note = cytidine-3'-phosphate
  modified_base 3: mod_base = OTHER; note = cytidine-3'-phosphate
  modified_base 4: mod_base = OTHER; note = uridine-3'-phosphate
  modified_base 5: mod_base = OTHER; note = cytidine-3'-phosphate
  modified_base 6: mod_base = OTHER; note = uridine-3'-phosphate
  modified_base 7: mod_base = OTHER; note = adenosine-3'-phosphate
  modified_base 8: mod_base = OTHER; note = guanosine-3'-phosphate
  modified_base 9: mod_base = OTHER; note = guanosine-3'-phosphate
  modified_base 10: mod_base = OTHER; note = cytidine-3'-phosphate
  modified_base 11: mod_base = OTHER; note = adenosine-3'-phosphate
  modified_base 12: mod_base = OTHER; note = guanosine-3'-phosphate
  modified_base 13: mod_base = OTHER; note = cytidine-3'-phosphate
  modified_base 14: mod_base = OTHER; note = guanosine-3'-phosphate
  modified_base 15: mod_base = OTHER; note = adenosine-3'-phosphate
  modified_base 16: mod_base = OTHER; note = cytidine-3'-phosphate
  modified_base 17: mod_base = OTHER; note = cytidine-3'-phosphate
  modified_base 18: mod_base = OTHER; note = cytidine-3'-phosphate
  modified_base 19: mod_base = OTHER; note = cytidine-3'-phosphate
  misc_feature 1..19: note = RNA
  misc_feature 20..21: note = DNA
acctctaggcagcgacccctt

SEQ ID NO: 1552 - DNA, 21 bp, synthetic construct
  source 1..21: mol_type = other DNA
  modified_base 1: mod_base = OTHER; note = uridine-3'-phosphate
  modified_base 2: mod_base = OTHER; note = guanosine-3'-phosphate
  modified_base 3: mod_base = OTHER; note = uridine-3'-phosphate
  modified_base 4: mod_base = OTHER; note = guanosine-3'-phosphate
  modified_base 5: mod_base = OTHER; note = guanosine-3'-phosphate
  modified_base 6: mod_base = OTHER; note = cytidine-3'-phosphate
  modified_base 7: mod_base = OTHER; note = cytidine-3'-phosphate
  modified_base 8: mod_base = OTHER; note = cytidine-3'-phosphate
  modified_base 9: mod_base = OTHER; note = uridine-3'-phosphate
  modified_base 10: mod_base = OTHER; note = cytidine-3'-phosphate
  modified_base 11: mod_base = OTHER; note = cytidine-3'-phosphate
  modified_base 12: mod_base = OTHER; note = adenosine-3'-phosphate
  modified_base 13: mod_base = OTHER; note = cytidine-3'-phosphate
  modified_base 14: mod_base = OTHER; note = cytidine-3'-phosphate
  modified_base 15: mod_base = OTHER; note = uridine-3'-phosphate
  modified_base 16: mod_base = OTHER; note = cytidine-3'-phosphate
  modified_base 17: mod_base = OTHER; note = uridine-3'-phosphate
  modified_base 18: mod_base = OTHER; note = adenosine-3'-phosphate
  modified_base 19: mod_base = OTHER; note = guanosine-3'-phosphate
  misc_feature 1..19: note = RNA
  misc_feature 20..21: note = DNA
tgtggccctccacctctagtt

SEQ ID NO: 1553 - DNA, 21 bp, synthetic construct
  source 1..21: mol_type = other DNA
  modified_base 1: mod_base = OTHER; note = uridine-3'-phosphate
  modified_base 2: mod_base = OTHER; note = guanosine-3'-phosphate
  modified_base 3: mod_base = OTHER; note = guanosine-3'-phosphate
  modified_base 4: mod_base = OTHER; note = cytidine-3'-phosphate
  modified_base 5: mod_base = OTHER; note = adenosine-3'-phosphate
  modified_base 6: mod_base = OTHER; note = cytidine-3'-phosphate
  modified_base 7: mod_base = OTHER; note = adenosine-3'-phosphate
  modified_base 8: mod_base = OTHER; note = guanosine-3'-phosphate
  modified_base 9: mod_base = OTHER; note = guanosine-3'-phosphate
  modified_base 10: mod_base = OTHER; note = cytidine-3'-phosphate
  modified_base 11: mod_base = OTHER; note = guanosine-3'-phosphate
  modified_base 12: mod_base = OTHER; note = guanosine-3'-phosphate
  modified_base 13: mod_base = OTHER; note = uridine-3'-phosphate
  modified_base 14: mod_base = OTHER; note = guanosine-3'-phosphate
  modified_base 15: mod_base = OTHER; note = guanosine-3'-phosphate
  modified_base 16: mod_base = OTHER; note = cytidine-3'-phosphate
  modified_base 17: mod_base = OTHER; note = cytidine-3'-phosphate
  modified_base 18: mod_base = OTHER; note = cytidine-3'-phosphate
  modified_base 19: mod_base = OTHER; note = uridine-3'-phosphate
  misc_feature 1..19: note = RNA
  misc_feature 20..21: note = DNA
tggcacaggcggtggcccttt

SEQ ID NO: 1554 - DNA, 21 bp, synthetic construct
  source 1..21: mol_type = other DNA
  modified_base 1: mod_base = OTHER; note = uridine-3'-phosphate
  modified_base 2: mod_base = OTHER; note = cytidine-3'-phosphate
  modified_base 3: mod_base = OTHER; note = cytidine-3'-phosphate
  modified_base 4: mod_base = OTHER; note = adenosine-3'-phosphate
  modified_base 5: mod_base = OTHER; note = cytidine-3'-phosphate
  modified_base 6: mod_base = OTHER; note = cytidine-3'-phosphate
  modified_base 7: mod_base = OTHER; note = guanosine-3'-phosphate
  modified_base 8: mod_base = OTHER; note = guanosine-3'-phosphate
  modified_base 9: mod_base = OTHER; note = guanosine-3'-phosphate
  modified_base 10: mod_base = OTHER; note = cytidine-3'-phosphate
  modified_base 11: mod_base = OTHER; note = adenosine-3'-phosphate
  modified_base 12: mod_base = OTHER; note = guanosine-3'-phosphate
  modified_base 13: mod_base = OTHER; note = uridine-3'-phosphate
  modified_base 14: mod_base = OTHER; note = guanosine-3'-phosphate
  modified_base 15: mod_base = OTHER; note = guanosine-3'-phosphate
  modified_base 16: mod_base = OTHER; note = cytidine-3'-phosphate
  modified_base 17: mod_base = OTHER; note = adenosine-3'-phosphate
  modified_base 18: mod_base = OTHER; note = cytidine-3'-phosphate
  modified_base 19: mod_base = OTHER; note = adenosine-3'-phosphate
  misc_feature 1..19: note = RNA
  misc_feature 20..21: note = DNA
tccaccgggcagtggcacatt

SEQ ID NO: 1555 - DNA, 21 bp, synthetic construct
  source 1..21: mol_type = other DNA
  modified_base 1: mod_base = OTHER; note = uridine-3'-phosphate
  modified_base 2: mod_base = OTHER; note = cytidine-3'-phosphate
  modified_base 3: mod_base = OTHER; note = uridine-3'-phosphate
  modified_base 4: mod_base = OTHER; note = cytidine-3'-phosphate
  modified_base 5: mod_base = OTHER; note = cytidine-3'-phosphate
  modified_base 6: mod_base = OTHER; note = guanosine-3'-phosphate
  modified_base 7: mod_base = OTHER; note = guanosine-3'-phosphate
  modified_base 8: mod_base = OTHER; note = uridine-3'-phosphate
  modified_base 9: mod_base = OTHER; note = guanosine-3'-phosphate
  modified_base 10: mod_base = OTHER; note = uridine-3'-phosphate
  modified_base 11: mod_base = OTHER; note = adenosine-3'-phosphate
  modified_base 12: mod_base = OTHER; note = guanosine-3'-phosphate
  modified_base 13: mod_base = OTHER; note = cytidine-3'-phosphate
  modified_base 14: mod_base = OTHER; note = cytidine-3'-phosphate
  modified_base 15: mod_base = OTHER; note = cytidine-3'-phosphate
  modified_base 16: mod_base = OTHER; note = adenosine-3'-phosphate
  modified_base 17: mod_base = OTHER; note = cytidine-3'-phosphate
  modified_base 18: mod_base = OTHER; note = cytidine-3'-phosphate
  modified_base 19: mod_base = OTHER; note = guanosine-3'-phosphate
  misc_feature 1..19: note = RNA
  misc_feature 20..21: note = DNA
tctccggtgtagcccaccgtt

SEQ ID NO: 1556 - DNA, 21 bp, synthetic construct
  source 1..21: mol_type = other DNA
  modified_base 1: mod_base = OTHER; note = uridine-3'-phosphate
  modified_base 2: mod_base = OTHER; note = guanosine-3'-phosphate
  modified_base 3: mod_base = OTHER; note = uridine-3'-phosphate
  modified_base 4: mod_base = OTHER; note = cytidine-3'-phosphate
  modified_base 5: mod_base = OTHER; note = guanosine-3'-phosphate
  modified_base 6: mod_base = OTHER; note = cytidine-3'-phosphate
  modified_base 7: mod_base = OTHER; note = adenosine-3'-phosphate
  modified_base 8: mod_base = OTHER; note = guanosine-3'-phosphate
  modified_base 9: mod_base = OTHER; note = adenosine-3'-phosphate
  modified_base 10: mod_base = OTHER; note = adenosine-3'-phosphate
  modified_base 11: mod_base = OTHER; note = guanosine-3'-phosphate
  modified_base 12: mod_base = OTHER; note = guanosine-3'-phosphate
  modified_base 13: mod_base = OTHER; note = cytidine-3'-phosphate
  modified_base 14: mod_base = OTHER; note = uridine-3'-phosphate
  modified_base 15: mod_base = OTHER; note = cytidine-3'-phosphate
  modified_base 16: mod_base = OTHER; note = cytidine-3'-phosphate
  modified_base 17: mod_base = OTHER; note = guanosine-3'-phosphate
  modified_base 18: mod_base = OTHER; note = guanosine-3'-phosphate
  modified_base 19: mod_base = OTHER; note = uridine-3'-phosphate
  misc_feature 1..19: note = RNA
  misc_feature 20..21: note = DNA
tgtcgcagaaggctccggttt

SEQ ID NO: 1557 - DNA, 21 bp, synthetic construct
  source 1..21: mol_type = other DNA
  modified_base 1: mod_base = OTHER; note = uridine-3'-phosphate
  modified_base 2: mod_base = OTHER; note = guanosine-3'-phosphate
  modified_base 3: mod_base = OTHER; note = guanosine-3'-phosphate
  modified_base 4: mod_base = OTHER; note = uridine-3'-phosphate
  modified_base 5: mod_base = OTHER; note = guanosine-3'-phosphate
  modified_base 6: mod_base = OTHER; note = uridine-3'-phosphate
  modified_base 7: mod_base = OTHER; note = cytidine-3'-phosphate
  modified_base 8: mod_base = OTHER; note = cytidine-3'-phosphate
  modified_base 9: mod_base = OTHER; note = adenosine-3'-phosphate
  modified_base 10: mod_base = OTHER; note = cytidine-3'-phosphate
  modified_base 11: mod_base = OTHER; note = guanosine-3'-phosphate
  modified_base 12: mod_base = OTHER; note = uridine-3'-phosphate
  modified_base 13: mod_base = OTHER; note = cytidine-3'-phosphate
  modified_base 14: mod_base = OTHER; note = guanosine-3'-phosphate
  modified_base 15: mod_base = OTHER; note = cytidine-3'-phosphate
  modified_base 16: mod_base = OTHER; note = adenosine-3'-phosphate
  modified_base 17: mod_base = OTHER; note = guanosine-3'-phosphate
  modified_base 18: mod_base = OTHER; note = adenosine-3'-phosphate
  modified_base 19: mod_base = OTHER; note = adenosine-3'-phosphate
  misc_feature 1..19: note = RNA
  misc_feature 20..21: note = DNA
tggtgtccacgtcgcagaatt

SEQ ID NO: 1558 - DNA, 21 bp, synthetic construct
  source 1..21: mol_type = other DNA
  modified_base 1: mod_base = OTHER; note = adenosine-3'-phosphate
  modified_base 2: mod_base = OTHER; note = guanosine-3'-phosphate
  modified_base 3: mod_base = OTHER; note = cytidine-3'-phosphate
  modified_base 4: mod_base = OTHER; note = adenosine-3'-phosphate
  modified_base 5: mod_base = OTHER; note = guanosine-3'-phosphate
  modified_base 6: mod_base = OTHER; note = cytidine-3'-phosphate
  modified_base 7: mod_base = OTHER; note = uridine-3'-phosphate
  modified_base 8: mod_base = OTHER; note = uridine-3'-phosphate
  modified_base 9: mod_base = OTHER; note = guanosine-3'-phosphate
  modified_base 10: mod_base = OTHER; note = cytidine-3'-phosphate
  modified_base 11: mod_base = OTHER; note = cytidine-3'-phosphate
  modified_base 12: mod_base = OTHER; note = uridine-3'-phosphate
  modified_base 13: mod_base = OTHER; note = uridine-3'-phosphate
  modified_base 14: mod_base = OTHER; note = guanosine-3'-phosphate
  modified_base 15: mod_base = OTHER; note = guanosine-3'-phosphate
  modified_base 16: mod_base = OTHER; note = uridine-3'-phosphate
  modified_base 17: mod_base = OTHER; note = guanosine-3'-phosphate
  modified_base 18: mod_base = OTHER; note = uridine-3'-phosphate
  modified_base 19: mod_base = OTHER; note = cytidine-3'-phosphate
  misc_feature 1..19: note = RNA
  misc_feature 20..21: note = DNA
agcagcttgccttggtgtctt

SEQ ID NO: 1559 - DNA, 21 bp, synthetic construct
  source 1..21: mol_type = other DNA
  modified_base 1: mod_base = OTHER; note = uridine-3'-phosphate
  modified_base 2: mod_base = OTHER; note = guanosine-3'-phosphate
  modified_base 3: mod_base = OTHER; note = guanosine-3'-phosphate
  modified_base 4: mod_base = OTHER; note = cytidine-3'-phosphate
  modified_base 5: mod_base = OTHER; note = cytidine-3'-phosphate
  modified_base 6: mod_base = OTHER; note = adenosine-3'-phosphate
  modified_base 7: mod_base = OTHER; note = uridine-3'-phosphate
  modified_base 8: mod_base = OTHER; note = cytidine-3'-phosphate
  modified_base 9: mod_base = OTHER; note = adenosine-3'-phosphate
  modified_base 10: mod_base = OTHER; note = uridine-3'-phosphate
  modified_base 11: mod_base = OTHER; note = adenosine-3'-phosphate
  modified_base 12: mod_base = OTHER; note = guanosine-3'-phosphate
  modified_base 13: mod_base = OTHER; note = cytidine-3'-phosphate
  modified_base 14: mod_base = OTHER; note = adenosine-3'-phosphate
  modified_base 15: mod_base = OTHER; note = guanosine-3'-phosphate
  modified_base 16: mod_base = OTHER; note = cytidine-3'-phosphate
  modified_base 17: mod_base = OTHER; note = uridine-3'-phosphate
  modified_base 18: mod_base = OTHER; note = uridine-3'-phosphate
  modified_base 19: mod_base = OTHER; note = guanosine-3'-phosphate
  misc_feature 1..19: note = RNA
  misc_feature 20..21: note = DNA
tggccatcatagcagcttgtt

SEQ ID NO: 1560 - DNA, 21 bp, synthetic construct
  source 1..21: mol_type = other DNA
  modified_base 1: mod_base = OTHER; note = adenosine-3'-phosphate
  modified_base 2: mod_base = OTHER; note = guanosine-3'-phosphate
  modified_base 3: mod_base = OTHER; note = cytidine-3'-phosphate
  modified_base 4: mod_base = OTHER; note = uridine-3'-phosphate
  modified_base 5: mod_base = OTHER; note = guanosine-3'-phosphate
  modified_base 6: mod_base = OTHER; note = adenosine-3'-phosphate
  modified_base 7: mod_base = OTHER; note = guanosine-3'-phosphate
  modified_base 8: mod_base = OTHER; note = cytidine-3'-phosphate
  modified_base 9: mod_base = OTHER; note = cytidine-3'-phosphate
  modified_base 10: mod_base = OTHER; note = cytidine-3'-phosphate
  modified_base 11: mod_base = OTHER; note = guanosine-3'-phosphate
  modified_base 12: mod_base = OTHER; note = cytidine-3'-phosphate
  modified_base 13: mod_base = OTHER; note = guanosine-3'-phosphate
  modified_base 14: mod_base = OTHER; note = guanosine-3'-phosphate
  modified_base 15: mod_base = OTHER; note = cytidine-3'-phosphate
  modified_base 16: mod_base = OTHER; note = cytidine-3'-phosphate
  modified_base 17: mod_base = OTHER; note = adenosine-3'-phosphate
  modified_base 18: mod_base = OTHER; note = uridine-3'-phosphate
  modified_base 19: mod_base = OTHER; note = cytidine-3'-phosphate
  misc_feature 1..19: note = RNA
  misc_feature 20..21: note = DNA
agctgagcccgcggccatctt

SEQ ID NO: 1561 - DNA, 21 bp, synthetic construct
  source 1..21: mol_type = other DNA
  modified_base 1: mod_base = OTHER; note = uridine-3'-phosphate
  modified_base 2: mod_base = OTHER; note = cytidine-3'-phosphate
  modified_base 3: mod_base = OTHER; note = cytidine-3'-phosphate
  modified_base 4: mod_base = OTHER; note = adenosine-3'-phosphate
  modified_base 5: mod_base = OTHER; note = guanosine-3'-phosphate
  modified_base 6: mod_base = OTHER; note = guanosine-3'-phosphate
  modified_base 7: mod_base = OTHER; note = cytidine-3'-phosphate
  modified_base 8: mod_base = OTHER; note = cytidine-3'-phosphate
  modified_base 9: mod_base = OTHER; note = guanosine-3'-phosphate
  modified_base 10: mod_base = OTHER; note = cytidine-3'-phosphate
  modified_base 11: mod_base = OTHER; note = guanosine-3'-phosphate
  modified_base 12: mod_base = OTHER; note = guanosine-3'-phosphate
  modified_base 13: mod_base = OTHER; note = uridine-3'-phosphate
  modified_base 14: mod_base = OTHER; note = adenosine-3'-phosphate
  modified_base 15: mod_base = OTHER; note = guanosine-3'-phosphate
  modified_base 16: mod_base = OTHER; note = cytidine-3'-phosphate
  modified_base 17: mod_base = OTHER; note = uridine-3'-phosphate
  modified_base 18: mod_base = OTHER; note = guanosine-3'-phosphate
  modified_base 19: mod_base = OTHER; note = adenosine-3'-phosphate
  misc_feature 1..19: note = RNA
  misc_feature 20..21: note = DNA
tccaggccgcggtagctgatt

SEQ ID NO: 1562 - DNA, 21 bp, synthetic construct
  source 1..21: mol_type = other DNA
  modified_base 1: mod_base = OTHER; note = uridine-3'-phosphate
  modified_base 2: mod_base = OTHER; note = guanosine-3'-phosphate
  modified_base 3: mod_base = OTHER; note = uridine-3'-phosphate
  modified_base 4: mod_base = OTHER; note = guanosine-3'-phosphate
  modified_base 5: mod_base = OTHER; note = guanosine-3'-phosphate
  modified_base 6: mod_base = OTHER; note = uridine-3'-phosphate
  modified_base 7: mod_base = OTHER; note = cytidine-3'-phosphate
  modified_base 8: mod_base = OTHER; note = cytidine-3'-phosphate
  modified_base 9: mod_base = OTHER; note = uridine-3'-phosphate
  modified_base 10: mod_base = OTHER; note = guanosine-3'-phosphate
  modified_base 11: mod_base = OTHER; note = guanosine-3'-phosphate
  modified_base 12: mod_base = OTHER; note = cytidine-3'-phosphate
  modified_base 13: mod_base = OTHER; note = cytidine-3'-phosphate
  modified_base 14: mod_base = OTHER; note = adenosine-3'-phosphate
  modified_base 15: mod_base = OTHER; note = guanosine-3'-phosphate
  modified_base 16: mod_base = OTHER; note = guanosine-3'-phosphate
  modified_base 17: mod_base = OTHER; note = cytidine-3'-phosphate
  modified_base 18: mod_base = OTHER; note = cytidine-3'-phosphate
  modified_base 19: mod_base = OTHER; note = guanosine-3'-phosphate
  misc_feature 1..19: note = RNA
  misc_feature 20..21: note = DNA
tgtggtcctggccaggccgtt

SEQ ID NO: 1563 - DNA, 21 bp, synthetic construct
  source 1..21: mol_type = other DNA
  modified_base 1: mod_base = OTHER; note = uridine-3'-phosphate
  modified_base 2: mod_base = OTHER; note = adenosine-3'-phosphate
  modified_base 3: mod_base = OTHER; note = cytidine-3'-phosphate
  modified_base 4: mod_base = OTHER; note = cytidine-3'-phosphate
  modified_base 5: mod_base = OTHER; note = cytidine-3'-phosphate
  modified_base 6: mod_base = OTHER; note = guanosine-3'-phosphate
  modified_base 7: mod_base = OTHER; note = adenosine-3'-phosphate
  modified_base 8: mod_base = OTHER; note = guanosine-3'-phosphate
  modified_base 9: mod_base = OTHER; note = adenosine-3'-phosphate
  modified_base 10: mod_base = OTHER; note = guanosine-3'-phosphate
  modified_base 11: mod_base = OTHER; note = cytidine-3'-phosphate
  modified_base 12: mod_base = OTHER; note = guanosine-3'-phosphate
  modified_base 13: mod_base = OTHER; note = uridine-3'-phosphate
  modified_base 14: mod_base = OTHER; note = guanosine-3'-phosphate
  modified_base 15: mod_base = OTHER; note = guanosine-3'-phosphate
  modified_base 16: mod_base = OTHER; note = uridine-3'-phosphate
  modified_base 17: mod_base = OTHER; note = cytidine-3'-phosphate
  modified_base 18: mod_base = OTHER; note = cytidine-3'-phosphate
  modified_base 19: mod_base = OTHER; note = uridine-3'-phosphate
  misc_feature 1..19: note = RNA
  misc_feature 20..21: note = DNA
tacccgagagcgtggtccttt

SEQ ID NO: 1564 - DNA, 21 bp, synthetic construct
  source 1..21: mol_type = other DNA
  modified_base 1: mod_base = OTHER; note = uridine-3'-phosphate
  modified_base 2: mod_base = OTHER; note = cytidine-3'-phosphate
  modified_base 3: mod_base = OTHER; note = uridine-3'-phosphate
  modified_base 4: mod_base = OTHER; note = guanosine-3'-phosphate
  modified_base 5: mod_base = OTHER; note = adenosine-3'-phosphate
  modified_base 6: mod_base = OTHER; note = cytidine-3'-phosphate
  modified_base 7: mod_base = OTHER; note = adenosine-3'-phosphate
  modified_base 8: mod_base = OTHER; note = guanosine-3'-phosphate
  modified_base 9: mod_base = OTHER; note = guanosine-3'-phosphate
  modified_base 10: mod_base = OTHER; note = guanosine-3'-phosphate
  modified_base 11: mod_base = OTHER; note = cytidine-3'-phosphate
  modified_base 12: mod_base = OTHER; note = guanosine-3'-phosphate
  modified_base 13: mod_base = OTHER; note = cytidine-3'-phosphate
  modified_base 14: mod_base = OTHER; note = adenosine-3'-phosphate
  modified_base 15: mod_base = OTHER; note = cytidine-3'-phosphate
  modified_base 16: mod_base = OTHER; note = cytidine-3'-phosphate
  modified_base 17: mod_base = OTHER; note = cytidine-3'-phosphate
  modified_base 18: mod_base = OTHER; note = guanosine-3'-phosphate
  modified_base 19: mod_base = OTHER; note = adenosine-3'-phosphate
  misc_feature 1..19: note = RNA
  misc_feature 20..21: note = DNA
tctgacagggcgcacccgatt

SEQ ID NO: 1565 - DNA, 21 bp, synthetic construct
  source 1..21: mol_type = other DNA
  modified_base 1: mod_base = OTHER; note = uridine-3'-phosphate
  modified_base 2: mod_base = OTHER; note = guanosine-3'-phosphate
  modified_base 3: mod_base = OTHER; note = adenosine-3'-phosphate
  modified_base 4: mod_base = OTHER; note = guanosine-3'-phosphate
  modified_base 5: mod_base = OTHER; note = guanosine-3'-phosphate
  modified_base 6: mod_base = OTHER; note = cytidine-3'-phosphate
  modified_base 7: mod_base = OTHER; note = cytidine-3'-phosphate
  modified_base 8: mod_base = OTHER; note = cytidine-3'-phosphate
  modified_base 9: mod_base = OTHER; note = adenosine-3'-phosphate
  modified_base 10: mod_base = OTHER; note = cytidine-3'-phosphate
  modified_base 11: mod_base = OTHER; note = guanosine-3'-phosphate
  modified_base 12: mod_base = OTHER; note = guanosine-3'-phosphate
  modified_base 13: mod_base = OTHER; note = cytidine-3'-phosphate
  modified_base 14: mod_base = OTHER; note = uridine-3'-phosphate
  modified_base 15: mod_base = OTHER; note = guanosine-3'-phosphate
  modified_base 16: mod_base = OTHER; note = adenosine-3'-phosphate
  modified_base 17: mod_base = OTHER; note = cytidine-3'-phosphate
  modified_base 18: mod_base = OTHER; note = adenosine-3'-phosphate
  modified_base 19: mod_base = OTHER; note = guanosine-3'-phosphate
  misc_feature 1..19: note = RNA
  misc_feature 20..21: note = DNA
tgaggcccacggctgacagtt

SEQ ID NO: 1566 - DNA, 21 bp, synthetic construct
  source 1..21: mol_type = other DNA
  modified_base 1: mod_base = OTHER; note = adenosine-3'-phosphate
  modified_base 2: mod_base = OTHER; note = guanosine-3'-phosphate
  modified_base 3: mod_base = OTHER; note = guanosine-3'-phosphate
  modified_base 4: mod_base = OTHER; note = uridine-3'-phosphate
  modified_base 5: mod_base = OTHER; note = guanosine-3'-phosphate
  modified_base 6: mod_base = OTHER; note = guanosine-3'-phosphate
  modified_base 7: mod_base = OTHER; note = cytidine-3'-phosphate
  modified_base 8: mod_base = OTHER; note = cytidine-3'-phosphate
  modified_base 9: mod_base = OTHER; note = uridine-3'-phosphate
  modified_base 10: mod_base = OTHER; note = cytidine-3'-phosphate
  modified_base 11: mod_base = OTHER; note = cytidine-3'-phosphate
  modified_base 12: mod_base = OTHER; note = guanosine-3'-phosphate
  modified_base 13: mod_base = OTHER; note = adenosine-3'-phosphate
  modified_base 14: mod_base = OTHER; note = guanosine-3'-phosphate
  modified_base 15: mod_base = OTHER; note = guanosine-3'-phosphate
  modified_base 16: mod_base = OTHER; note = cytidine-3'-phosphate
  modified_base 17: mod_base = OTHER; note = cytidine-3'-phosphate
  modified_base 18: mod_base = OTHER; note = cytidine-3'-phosphate
  modified_base 19: mod_base = OTHER; note = adenosine-3'-phosphate
  misc_feature 1..19: note = RNA
  misc_feature 20..21: note = DNA
aggtggcctccgaggcccatt

SEQ ID NO: 1567 - DNA, 21 bp, synthetic construct
  source 1..21: mol_type = other DNA
  modified_base 1: mod_base = OTHER; note = uridine-3'-phosphate
  modified_base 2: mod_base = OTHER; note = uridine-3'-phosphate
  modified_base 3: mod_base = OTHER; note = cytidine-3'-phosphate
  modified_base 4: mod_base = OTHER; note = adenosine-3'-phosphate
  modified_base 5: mod_base = OTHER; note = cytidine-3'-phosphate
  modified_base 6: mod_base = OTHER; note = guanosine-3'-phosphate
  modified_base 7: mod_base = OTHER; note = uridine-3'-phosphate
  modified_base 8: mod_base = OTHER; note = uridine-3'-phosphate
  modified_base 9: mod_base = OTHER; note = cytidine-3'-phosphate
  modified_base 10: mod_base = OTHER; note = cytidine-3'-phosphate
  modified_base 11: mod_base = OTHER; note = guanosine-3'-phosphate
  modified_base 12: mod_base = OTHER; note = guanosine-3'-phosphate
  modified_base 13: mod_base = OTHER; note = uridine-3'-phosphate
  modified_base 14: mod_base = OTHER; note = adenosine-3'-phosphate
  modified_base 15: mod_base = OTHER; note = guanosine-3'-phosphate
  modified_base 16: mod_base = OTHER; note = guanosine-3'-phosphate
  modified_base 17: mod_base = OTHER; note = uridine-3'-phosphate
  modified_base 18: mod_base = OTHER; note = guanosine-3'-phosphate
  modified_base 19: mod_base = OTHER; note = guanosine-3'-phosphate
  misc_feature 1..19: note = RNA
  misc_feature 20..21: note = DNA
ttcacgttccggtaggtggtt

SEQ ID NO: 1568 - DNA, 21 bp, synthetic construct
  source 1..21: mol_type = other DNA
  modified_base 1: mod_base = OTHER; note = uridine-3'-phosphate
  modified_base 2: mod_base = OTHER; note = uridine-3'-phosphate
  modified_base 3: mod_base = OTHER; note = uridine-3'-phosphate
  modified_base 4: mod_base = OTHER; note = guanosine-3'-phosphate
  modified_base 5: mod_base = OTHER; note = cytidine-3'-phosphate
  modified_base 6: mod_base = OTHER; note = uridine-3'-phosphate
  modified_base 7: mod_base = OTHER; note = cytidine-3'-phosphate
  modified_base 8: mod_base = OTHER; note = guanosine-3'-phosphate
  modified_base 9: mod_base = OTHER; note = guanosine-3'-phosphate
  modified_base 10: mod_base = OTHER; note = cytidine-3'-phosphate
  modified_base 11: mod_base = OTHER; note = adenosine-3'-phosphate
  modified_base 12: mod_base = OTHER; note = guanosine-3'-phosphate
  modified_base 13: mod_base = OTHER; note = uridine-3'-phosphate
  modified_base 14: mod_base = OTHER; note = cytidine-3'-phosphate
  modified_base 15: mod_base = OTHER; note = adenosine-3'-phosphate
  modified_base 16: mod_base = OTHER; note = cytidine-3'-phosphate
  modified_base 17: mod_base = OTHER; note = guanosine-3'-phosphate
  modified_base 18: mod_base = OTHER; note = uridine-3'-phosphate
  modified_base 19: mod_base = OTHER; note = uridine-3'-phosphate
  misc_feature 1..19: note = RNA
  misc_feature 20..21: note = DNA
tttgctcggcagtcacgtttt

SEQ ID NO: 1569 - DNA, 21 bp, synthetic construct
  source 1..21: mol_type = other DNA
  modified_base 1: mod_base = OTHER; note = uridine-3'-phosphate
  modified_base 2: mod_base = OTHER; note = cytidine-3'-phosphate
  modified_base 3: mod_base = OTHER; note = adenosine-3'-phosphate
  modified_base 4: mod_base = OTHER; note = guanosine-3'-phosphate
  modified_base 5: mod_base = OTHER; note = uridine-3'-phosphate
  modified_base 6: mod_base = OTHER; note = uridine-3'-phosphate
  modified_base 7: mod_base = OTHER; note = cytidine-3'-phosphate
  modified_base 8: mod_base = OTHER; note = cytidine-3'-phosphate
  modified_base 9: mod_base = OTHER; note = guanosine-3'-phosphate
  modified_base 10: mod_base = OTHER; note = cytidine-3'-phosphate
  modified_base 11: mod_base = OTHER; note = guanosine-3'-phosphate
  modified_base 12: mod_base = OTHER; note = cytidine-3'-phosphate
  modified_base 13: mod_base = OTHER; note = uridine-3'-phosphate
  modified_base 14: mod_base = OTHER; note = uridine-3'-phosphate
  modified_base 15: mod_base = OTHER; note = guanosine-3'-phosphate
  modified_base 16: mod_base = OTHER; note = cytidine-3'-phosphate
  modified_base 17: mod_base = OTHER; note = uridine-3'-phosphate
  modified_base 18: mod_base = OTHER; note = cytidine-3'-phosphate
  modified_base 19: mod_base = OTHER; note = guanosine-3'-phosphate
  misc_feature 1..19: note = RNA
  misc_feature 20..21: note = DNA
tcagttccgcgcttgctcgtt

SEQ ID NO: 1570 - DNA, 21 bp, synthetic construct
  source 1..21: mol_type = other DNA
  modified_base 1: mod_base = OTHER; note = uridine-3'-phosphate
  modified_base 2: mod_base = OTHER; note = guanosine-3'-phosphate
  modified_base 3: mod_base = OTHER; note = cytidine-3'-phosphate
  modified_base 4: mod_base = OTHER; note = cytidine-3'-phosphate
  modified_base 5: mod_base = OTHER; note = cytidine-3'-phosphate
  modified_base 6: mod_base = OTHER; note = adenosine-3'-phosphate
  modified_base 7: mod_base = OTHER; note = guanosine-3'-phosphate
  modified_base 8: mod_base = OTHER; note = uridine-3'-phosphate
  modified_base 9: mod_base = OTHER; note = cytidine-3'-phosphate
  modified_base 10: mod_base = OTHER; note = cytidine-3'-phosphate
  modified_base 11: mod_base = OTHER; note = cytidine-3'-phosphate
  modified_base 12: mod_base = OTHER; note = cytidine-3'-phosphate
  modified_base 13: mod_base = OTHER; note = adenosine-3'-phosphate
  modified_base 14: mod_base = OTHER; note = guanosine-3'-phosphate
  modified_base 15: mod_base = OTHER; note = uridine-3'-phosphate
  modified_base 16: mod_base = OTHER; note = uridine-3'-phosphate
  modified_base 17: mod_base = OTHER; note = cytidine-3'-phosphate
  modified_base 18: mod_base = OTHER; note = cytidine-3'-phosphate
  modified_base 19: mod_base = OTHER; note = guanosine-3'-phosphate
  misc_feature 1..19: note = RNA
  misc_feature 20..21: note = DNA
tgcccagtccccagttccgtt

SEQ ID NO: 1571 - DNA, 21 bp, synthetic construct
  source 1..21: mol_type = other DNA
  modified_base 1: mod_base = OTHER; note = adenosine-3'-phosphate
  modified_base 2: mod_base = OTHER; note = adenosine-3'-phosphate
  modified_base 3: mod_base = OTHER; note = guanosine-3'-phosphate
  modified_base 4: mod_base = OTHER; note = guanosine-3'-phosphate
  modified_base 5: mod_base = OTHER; note = cytidine-3'-phosphate
  modified_base 6: mod_base = OTHER; note = guanosine-3'-phosphate
  modified_base 7: mod_base = OTHER; note = uridine-3'-phosphate
  modified_base 8: mod_base = OTHER; note = guanosine-3'-phosphate
  modified_base 9: mod_base = OTHER; note = guanosine-3'-phosphate
  modified_base 10: mod_base = OTHER; note = cytidine-3'-phosphate
  modified_base 11: mod_base = OTHER; note = cytidine-3'-phosphate
  modified_base 12: mod_base = OTHER; note = guanosine-3'-phosphate
  modified_base 13: mod_base = OTHER; note = cytidine-3'-phosphate
  modified_base 14: mod_base = OTHER; note = cytidine-3'-phosphate
  modified_base 15: mod_base = OTHER; note = cytidine-3'-phosphate
  modified_base 16: mod_base = OTHER; note = adenosine-3'-phosphate
  modified_base 17: mod_base = OTHER; note = guanosine-3'-phosphate
  modified_base 18: mod_base = OTHER; note = uridine-3'-phosphate
  modified_base 19: mod_base = OTHER; note = cytidine-3'-phosphate
  misc_feature 1..19: note = RNA
  misc_feature 20..21: note = DNA
aaggcgtggccgcccagtctt

SEQ ID NO: 1572 - DNA, 21 bp, synthetic construct
  source 1..21: mol_type = other DNA
  modified_base 1: mod_base = OTHER; note = uridine-3'-phosphate
  modified_base 2: mod_base = OTHER; note = guanosine-3'-phosphate
  modified_base 3: mod_base = OTHER; note = guanosine-3'-phosphate
  modified_base 4: mod_base = OTHER; note = uridine-3'-phosphate
  modified_base 5: mod_base = OTHER; note = uridine-3'-phosphate
  modified_base 6: mod_base = OTHER; note = cytidine-3'-phosphate
  modified_base 7: mod_base = OTHER; note = cytidine-3'-phosphate
  modified_base 8: mod_base = OTHER; note = guanosine-3'-phosphate
  modified_base 9: mod_base = OTHER; note = guanosine-3'-phosphate
  modified_base 10: mod_base = OTHER; note = cytidine-3'-phosphate
  modified_base 11: mod_base = OTHER; note = adenosine-3'-phosphate
  modified_base 12: mod_base = OTHER; note = guanosine-3'-phosphate
  modified_base 13: mod_base = OTHER; note = adenosine-3'-phosphate
  modified_base 14: mod_base = OTHER; note = adenosine-3'-phosphate
  modified_base 15: mod_base = OTHER; note = guanosine-3'-phosphate
  modified_base 16: mod_base = OTHER; note = guanosine-3'-phosphate
  modified_base 17: mod_base = OTHER; note = cytidine-3'-phosphate
  modified_base 18: mod_base = OTHER; note = guanosine-3'-phosphate
  modified_base 19: mod_base = OTHER; note = uridine-3'-phosphate
  misc_feature 1..19: note = RNA
  misc_feature 20..21: note = DNA
tggttccggcagaaggcgttt

SEQ ID NO: 1573 - DNA, 21 bp, synthetic construct
  source 1..21: mol_type = other DNA
  modified_base 1: mod_base = OTHER; note = uridine-3'-phosphate
  modified_base 2: mod_base = OTHER; note = guanosine-3'-phosphate
  modified_base 3: mod_base = OTHER; note = uridine-3'-phosphate
  modified_base 4: mod_base = OTHER; note = cytidine-3'-phosphate
  modified_base 5: mod_base = OTHER; note = guanosine-3'-phosphate
  modified_base 6: mod_base = OTHER; note = uridine-3'-phosphate
  modified_base 7: mod_base = OTHER; note = uridine-3'-phosphate
  modified_base 8: mod_base = OTHER; note = guanosine-3'-phosphate
  modified_base 9: mod_base = OTHER; note = uridine-3'-phosphate
  modified_base 10: mod_base = OTHER; note = cytidine-3'-phosphate
  modified_base 11: mod_base = OTHER; note = cytidine-3'-phosphate
  modified_base 12: mod_base = OTHER; note = guanosine-3'-phosphate
  modified_base 13: mod_base = OTHER; note = guanosine-3'-phosphate
  modified_base 14: mod_base = OTHER; note = guanosine-3'-phosphate
  modified_base 15: mod_base = OTHER; note = uridine-3'-phosphate
  modified_base 16: mod_base = OTHER; note = uridine-3'-phosphate
  modified_base 17: mod_base = OTHER; note = cytidine-3'-phosphate
  modified_base 18: mod_base = OTHER; note = cytidine-3'-phosphate
  modified_base 19: mod_base = OTHER; note = guanosine-3'-phosphate
  misc_feature 1..19: note = RNA
  misc_feature 20..21: note = DNA
tgtcgttgtccgggttccgtt

SEQ ID NO: 1574 - DNA, 21 bp, synthetic construct
  source 1..21: mol_type = other DNA
  modified_base 1: mod_base = OTHER; note = adenosine-3'-phosphate
  modified_base 2: mod_base = OTHER; note = cytidine-3'-phosphate
  modified_base 3: mod_base = OTHER; note = cytidine-3'-phosphate
  modified_base 4: mod_base = OTHER; note = adenosine-3'-phosphate
  modified_base 5: mod_base = OTHER; note = cytidine-3'-phosphate
  modified_base 6: mod_base = OTHER; note = guanosine-3'-phosphate
  modified_base 7: mod_base = OTHER; note = guanosine-3'-phosphate
  modified_base 8: mod_base = OTHER; note = guanosine-3'-phosphate
  modified_base 9: mod_base = OTHER; note = cytidine-3'-phosphate
  modified_base 10: mod_base = OTHER; note = guanosine-3'-phosphate
  modified_base 11: mod_base = OTHER; note = guanosine-3'-phosphate
  modified_base 12: mod_base = OTHER; note = adenosine-3'-phosphate
  modified_base 13: mod_base = OTHER; note = uridine-3'-phosphate
  modified_base 14: mod_base = OTHER; note = guanosine-3'-phosphate
  modified_base 15: mod_base = OTHER; note = uridine-3'-phosphate
  modified_base 16: mod_base = OTHER; note = cytidine-3'-phosphate
  modified_base 17: mod_base = OTHER; note = guanosine-3'-phosphate
  modified_base 18: mod_base = OTHER; note = uridine-3'-phosphate
  modified_base 19: mod_base = OTHER; note = uridine-3'-phosphate
  misc_feature 1..19: note = RNA
  misc_feature 20..21: note = DNA
accacgggcggatgtcgtttt

SEQ ID NO: 1575 - DNA, 21 bp, synthetic construct
  source 1..21: mol_type = other DNA
  modified_base 1: mod_base = OTHER; note = adenosine-3'-phosphate
  modified_base 2: mod_base = OTHER; note = guanosine-3'-phosphate
  modified_base 3: mod_base = OTHER; note = cytidine-3'-phosphate
  modified_base 4: mod_base = OTHER; note = adenosine-3'-phosphate
  modified_base 5: mod_base = OTHER; note = cytidine-3'-phosphate
  modified_base 6: mod_base = OTHER; note = guanosine-3'-phosphate
  modified_base 7: mod_base = OTHER; note = adenosine-3'-phosphate
  modified_base 8: mod_base = OTHER; note = adenosine-3'-phosphate
  modified_base 9: mod_base = OTHER; note = guanosine-3'-phosphate
  modified_base 10: mod_base = OTHER; note = cytidine-3'-phosphate
  modified_base 11: mod_base = OTHER; note = adenosine-3'-phosphate
  modified_base 12: mod_base = OTHER; note = cytidine-3'-phosphate
  modified_base 13: mod_base = OTHER; note = cytidine-3'-phosphate
  modified_base 14: mod_base = OTHER; note = adenosine-3'-phosphate
  modified_base 15: mod_base = OTHER; note = cytidine-3'-phosphate
  modified_base 16: mod_base = OTHER; note = guanosine-3'-phosphate
  modified_base 17: mod_base = OTHER; note = guanosine-3'-phosphate
  modified_base 18: mod_base = OTHER; note = guanosine-3'-phosphate
  modified_base 19: mod_base = OTHER; note = cytidine-3'-phosphate
  misc_feature 1..19: note = RNA
  misc_feature 20..21: note = DNA
agcacgaagcaccacgggctt

SEQ ID NO: 1576 - DNA, 21 bp, synthetic construct
  source 1..21: mol_type = other DNA
  modified_base 1: mod_base = OTHER; note = uridine-3'-phosphate
  modified_base 2: mod_base = OTHER; note = guanosine-3'-phosphate
  modified_base 3: mod_base = OTHER; note = uridine-3'-phosphate
  modified_base 4: mod_base = OTHER; note = cytidine-3'-phosphate
  modified_base 5: mod_base = OTHER; note = guanosine-3'-phosphate
  modified_base 6: mod_base = OTHER; note = cytidine-3'-phosphate
  modified_base 7: mod_base = OTHER; note = guanosine-3'-phosphate
  modified_base 8: mod_base = OTHER; note = guanosine-3'-phosphate
  modified_base 9: mod_base = OTHER; note = uridine-3'-phosphate
  modified_base 10: mod_base = OTHER; note = uridine-3'-phosphate
  modified_base 11: mod_base = OTHER; note = cytidine-3'-phosphate
  modified_base 12: mod_base = OTHER; note = adenosine-3'-phosphate
  modified_base 13: mod_base = OTHER; note = guanosine-3'-phosphate
  modified_base 14: mod_base = OTHER; note = cytidine-3'-phosphate
  modified_base 15: mod_base = OTHER; note = adenosine-3'-phosphate
  modified_base 16: mod_base = OTHER; note = cytidine-3'-phosphate
  modified_base 17: mod_base = OTHER; note = guanosine-3'-phosphate
  modified_base 18: mod_base = OTHER; note = adenosine-3'-phosphate
  modified_base 19: mod_base = OTHER; note = adenosine-3'-phosphate
  misc_feature 1..19: note = RNA
  misc_feature 20..21: note = DNA
tgtcgcggttcagcacgaatt

SEQ ID NO: 1577 - DNA, 21 bp, synthetic construct
  source 1..21: mol_type = other DNA
  modified_base 1: mod_base = OTHER; note = uridine-3'-phosphate
  modified_base 2: mod_base = OTHER; note = adenosine-3'-phosphate
  modified_base 3: mod_base = OTHER; note = guanosine-3'-phosphate
  modified_base 4: mod_base = OTHER; note = cytidine-3'-phosphate
  modified_base 5: mod_base = OTHER; note = uridine-3'-phosphate
  modified_base 6: mod_base = OTHER; note = cytidine-3'-phosphate
  modified_base 7: mod_base = OTHER; note = adenosine-3'-phosphate
  modified_base 8: mod_base = OTHER; note = guanosine-3'-phosphate
  modified_base 9: mod_base = OTHER; note = cytidine-3'-phosphate
  modified_base 10: mod_base = OTHER; note = cytidine-3'-phosphate
  modified_base 11: mod_base = OTHER; note = guanosine-3'-phosphate
  modified_base 12: mod_base = OTHER; note = guanosine-3'-phosphate
  modified_base 13: mod_base = OTHER; note = uridine-3'-phosphate
  modified_base 14: mod_base = OTHER; note = cytidine-3'-phosphate
  modified_base 15: mod_base = OTHER; note = guanosine-3'-phosphate
  modified_base 16: mod_base = OTHER; note = cytidine-3'-phosphate
  modified_base 17: mod_base = OTHER; note = guanosine-3'-phosphate
  modified_base 18: mod_base = OTHER; note = guanosine-3'-phosphate
  modified_base 19: mod_base = OTHER; note = uridine-3'-phosphate
  misc_feature 1..19: note = RNA
  misc_feature 20..21: note = DNA
tagctcagccggtcgcggttt

SEQ ID NO: 1578 - DNA, 21 bp, synthetic construct
  source 1..21: mol_type = other DNA
  modified_base 1: mod_base = OTHER; note = uridine-3'-phosphate
  modified_base 2: mod_base = OTHER; note = guanosine-3'-phosphate
  modified_base 3: mod_base = OTHER; note = cytidine-3'-phosphate
  modified_base 4: mod_base = OTHER; note = adenosine-3'-phosphate
  modified_base 5: mod_base = OTHER; note = guanosine-3'-phosphate
  modified_base 6: mod_base = OTHER; note = uridine-3'-phosphate
  modified_base 7: mod_base = OTHER; note = adenosine-3'-phosphate
  modified_base 8: mod_base = OTHER; note = cytidine-3'-phosphate
  modified_base 9: mod_base = OTHER; note = uridine-3'-phosphate
  modified_base 10: mod_base = OTHER; note = cytidine-3'-phosphate
  modified_base 11: mod_base = OTHER; note = cytidine-3'-phosphate
  modified_base 12: mod_base = OTHER; note = cytidine-3'-phosphate
  modified_base 13: mod_base = OTHER; note = adenosine-3'-phosphate
  modified_base 14: mod_base = OTHER; note = guanosine-3'-phosphate
  modified_base 15: mod_base = OTHER; note = cytidine-3'-phosphate
  modified_base 16: mod_base = OTHER; note = uridine-3'-phosphate
  modified_base 17: mod_base = OTHER; note = cytidine-3'-phosphate
  modified_base 18: mod_base = OTHER; note = adenosine-3'-phosphate
  modified_base 19: mod_base = OTHER; note = guanosine-3'-phosphate
  misc_feature 1..19: note = RNA
  misc_feature 20..21: note = DNA
tgcagtactcccagctcagtt

SEQ ID NO: 1579 - DNA, 21 bp, synthetic construct
  source 1..21: mol_type = other DNA
  modified_base 1: mod_base = OTHER; note = adenosine-3'-phosphate
  modified_base 2: mod_base = OTHER; note = cytidine-3'-phosphate
  modified_base 3: mod_base = OTHER; note = uridine-3'-phosphate
  modified_base 4: mod_base = OTHER; note = guanosine-3'-phosphate
  modified_base 5: mod_base = OTHER; note = uridine-3'-phosphate
  modified_base 6: mod_base = OTHER; note = guanosine-3'-phosphate
  modified_base 7: mod_base = OTHER; note = cytidine-3'-phosphate
  modified_base 8: mod_base = OTHER; note = cytidine-3'-phosphate
  modified_base 9: mod_base = OTHER; note = adenosine-3'-phosphate
  modified_base 10: mod_base = OTHER; note = guanosine-3'-phosphate
  modified_base 11: mod_base = OTHER; note = guanosine-3'-phosphate
  modified_base 12: mod_base = OTHER; note = uridine-3'-phosphate
  modified_base 13: mod_base = OTHER; note = cytidine-3'-phosphate
  modified_base 14: mod_base = OTHER; note = guanosine-3'-phosphate
  modified_base 15: mod_base = OTHER; note = cytidine-3'-phosphate
  modified_base 16: mod_base = OTHER; note = adenosine-3'-phosphate
  modified_base 17: mod_base = OTHER; note = guanosine-3'-phosphate
  modified_base 18: mod_base = OTHER; note = uridine-3'-phosphate
  modified_base 19: mod_base = OTHER; note = adenosine-3'-phosphate
  misc_feature 1..19: note = RNA
  misc_feature 20..21: note = DNA
actgtgccaggtcgcagtatt

SEQ ID NO: 1580 - DNA, 21 bp, synthetic construct
  source 1..21: mol_type = other DNA
  modified_base 1: mod_base = OTHER; note = uridine-3'-phosphate
  modified_base 2: mod_base = OTHER; note = guanosine-3'-phosphate
  modified_base 3: mod_base = OTHER; note = guanosine-3'-phosphate
  modified_base 4: mod_base = OTHER; note = guanosine-3'-phosphate
  modified_base 5: mod_base = OTHER; note = uridine-3'-phosphate
  modified_base 6: mod_base = OTHER; note = cytidine-3'-phosphate
  modified_base 7: mod_base = OTHER; note = uridine-3'-phosphate
  modified_base 8: mod_base = OTHER; note = guanosine-3'-phosphate
  modified_base 9: mod_base = OTHER; note = guanosine-3'-phosphate
  modified_base 10: mod_base = OTHER; note = cytidine-3'-phosphate
  modified_base 11: mod_base = OTHER; note = adenosine-3'-phosphate
  modified_base 12: mod_base = OTHER; note = cytidine-3'-phosphate
  modified_base 13: mod_base = OTHER; note = uridine-3'-phosphate
  modified_base 14: mod_base = OTHER; note = guanosine-3'-phosphate
  modified_base 15: mod_base = OTHER; note = uridine-3'-phosphate
  modified_base 16: mod_base = OTHER; note = guanosine-3'-phosphate
  modified_base 17: mod_base = OTHER; note = cytidine-3'-phosphate
  modified_base 18: mod_base = OTHER; note = cytidine-3'-phosphate
  modified_base 19: mod_base = OTHER; note = adenosine-3'-phosphate
  misc_feature 1..19: note = RNA
  misc_feature 20..21: note = DNA
tgggtctggcactgtgccatt

SEQ ID NO: 1581 - DNA, 21 bp, synthetic construct
  source 1..21: mol_type = other DNA
  modified_base 1: mod_base = OTHER; note = uridine-3'-phosphate
  modified_base 2: mod_base = OTHER; note = cytidine-3'-phosphate
  modified_base 3: mod_base = OTHER; note = cytidine-3'-phosphate
  modified_base 4: mod_base = OTHER; note = guanosine-3'-phosphate
  modified_base 5: mod_base = OTHER; note = cytidine-3'-phosphate
  modified_base 6: mod_base = OTHER; note = cytidine-3'-phosphate
  modified_base 7: mod_base = OTHER; note = uridine-3'-phosphate
  modified_base 8: mod_base = OTHER; note = guanosine-3'-phosphate
  modified_base 9: mod_base = OTHER; note = guanosine-3'-phosphate
  modified_base 10: mod_base = OTHER; note = guanosine-3'-phosphate
  modified_base 11: mod_base = OTHER; note = uridine-3'-phosphate
  modified_base 12: mod_base = OTHER; note = uridine-3'-phosphate
  modified_base 13: mod_base = OTHER; note = guanosine-3'-phosphate
  modified_base 14: mod_base = OTHER; note = guanosine-3'-phosphate
  modified_base 15: mod_base = OTHER; note = guanosine-3'-phosphate
  modified_base 16: mod_base = OTHER; note = guanosine-3'-phosphate
  modified_base 17: mod_base = OTHER; note = uridine-3'-phosphate
  modified_base 18: mod_base = OTHER; note = cytidine-3'-phosphate
  modified_base 19: mod_base = OTHER; note = uridine-3'-phosphate
  misc_feature 1..19: note = RNA
  misc_feature 20..21: note = DNA
tccgcctgggttggggtcttt

SEQ ID NO: 1582 - DNA, 21 bp, synthetic construct
  source 1..21: mol_type = other DNA
  modified_base 1: mod_base = OTHER; note = uridine-3'-phosphate
  modified_base 2: mod_base = OTHER; note = guanosine-3'-phosphate
  modified_base 3: mod_base = OTHER; note = guanosine-3'-phosphate
  modified_base 4: mod_base = OTHER; note = guanosine-3'-phosphate
  modified_base 5: mod_base = OTHER; note = uridine-3'-phosphate
  modified_base 6: mod_base = OTHER; note = cytidine-3'-phosphate
  modified_base 7: mod_base = OTHER; note = guanosine-3'-phosphate
  modified_base 8: mod_base = OTHER; note = guanosine-3'-phosphate
  modified_base 9: mod_base = OTHER; note = adenosine-3'-phosphate
  modified_base 10: mod_base = OTHER; note = guanosine-3'-phosphate
  modified_base 11: mod_base = OTHER; note = guanosine-3'-phosphate
  modified_base 12: mod_base = OTHER; note = cytidine-3'-phosphate
  modified_base 13: mod_base = OTHER; note = guanosine-3'-phosphate
  modified_base 14: mod_base = OTHER; note = cytidine-3'-phosphate
  modified_base 15: mod_base = OTHER; note = cytidine-3'-phosphate
  modified_base 16: mod_base = OTHER; note = guanosine-3'-phosphate
  modified_base 17: mod_base = OTHER; note = cytidine-3'-phosphate
  modified_base 18: mod_base = OTHER; note = cytidine-3'-phosphate
  modified_base 19: mod_base = OTHER; note = uridine-3'-phosphate
  misc_feature 1..19: note = RNA
  misc_feature 20..21: note = DNA
tgggtcggaggcgccgccttt

SEQ ID NO: 1583 - DNA, 21 bp, synthetic construct
  source 1..21: mol_type = other DNA
  modified_base 1: mod_base = OTHER; note = adenosine-3'-phosphate
  modified_base 2: mod_base = OTHER; note = guanosine-3'-phosphate
  modified_base 3: mod_base = OTHER; note = guanosine-3'-phosphate
  modified_base 4: mod_base = OTHER; note = guanosine-3'-phosphate
  modified_base 5: mod_base = OTHER; note = guanosine-3'-phosphate
  modified_base 6: mod_base = OTHER; note = adenosine-3'-phosphate
  modified_base 7: mod_base = OTHER; note = cytidine-3'-phosphate
  modified_base 8: mod_base = OTHER; note = adenosine-3'-phosphate
  modified_base 9: mod_base = OTHER; note = cytidine-3'-phosphate
  modified_base 10: mod_base = OTHER; note = cytidine-3'-phosphate
  modified_base 11: mod_base = OTHER; note = guanosine-3'-phosphate
  modified_base 12: mod_base = OTHER; note = guanosine-3'-phosphate
  modified_base 13: mod_base = OTHER; note = guanosine-3'-phosphate
  modified_base 14: mod_base = OTHER; note = guanosine-3'-phosphate
  modified_base 15: mod_base = OTHER; note = uridine-3'-phosphate
  modified_base 16: mod_base = OTHER; note = cytidine-3'-phosphate
  modified_base 17: mod_base = OTHER; note = guanosine-3'-phosphate
  modified_base 18: mod_base = OTHER; note = guanosine-3'-phosphate
  modified_base 19: mod_base = OTHER; note = adenosine-3'-phosphate
  misc_feature 1..19: note = RNA
  misc_feature 20..21: note = DNA
aggggacaccggggtcggatt

SEQ ID NO: 1584 - DNA, 21 bp, synthetic construct
  source 1..21: mol_type = other DNA
  modified_base 1: mod_base = OTHER; note = adenosine-3'-phosphate
  modified_base 2: mod_base = OTHER; note = cytidine-3'-phosphate
  modified_base 3: mod_base = OTHER; note = adenosine-3'-phosphate
  modified_base 4: mod_base = OTHER; note = uridine-3'-phosphate
  modified_base 5: mod_base = OTHER; note = guanosine-3'-phosphate
  modified_base 6: mod_base = OTHER; note = adenosine-3'-phosphate
  modified_base 7: mod_base = OTHER; note = adenosine-3'-phosphate
  modified_base 8: mod_base = OTHER; note = guanosine-3'-phosphate
  modified_base 9: mod_base = OTHER; note = cytidine-3'-phosphate
  modified_base 10: mod_base = OTHER; note = cytidine-3'-phosphate
  modified_base 11: mod_base = OTHER; note = uridine-3'-phosphate
  modified_base 12: mod_base = OTHER; note = adenosine-3'-phosphate
  modified_base 13: mod_base = OTHER; note = guanosine-3'-phosphate
  modified_base 14: mod_base = OTHER; note = guanosine-3'-phosphate
  modified_base 15: mod_base = OTHER; note = guanosine-3'-phosphate
  modified_base 16: mod_base = OTHER; note = guanosine-3'-phosphate
  modified_base 17: mod_base = OTHER; note = adenosine-3'-phosphate
  modified_base 18: mod_base = OTHER; note = cytidine-3'-phosphate
  modified_base 19: mod_base = OTHER; note = adenosine-3'-phosphate
  misc_feature 1..19: note = RNA
  misc_feature 20..21: note = DNA
acatgaagcctaggggacatt

SEQ ID NO: 1585 - DNA, 21 bp, synthetic construct
  source 1..21: mol_type = other DNA
  modified_base 1: mod_base = OTHER; note = uridine-3'-phosphate
  modified_base 2: mod_base = OTHER; note = guanosine-3'-phosphate
  modified_base 3: mod_base = OTHER; note = cytidine-3'-phosphate
  modified_base 4: mod_base = OTHER; note = adenosine-3'-phosphate
  modified_base 5: mod_base = OTHER; note = uridine-3'-phosphate
  modified_base 6: mod_base = OTHER; note = guanosine-3'-phosphate
  modified_base 7: mod_base = OTHER; note = adenosine-3'-phosphate
  modified_base 8: mod_base = OTHER; note = guanosine-3'-phosphate
  modified_base 9: mod_base = OTHER; note = uridine-3'-phosphate
  modified_base 10: mod_base = OTHER; note = guanosine-3'-phosphate
  modified_base 11: mod_base = OTHER; note = guanosine-3'-phosphate
  modified_base 12: mod_base = OTHER; note = guanosine-3'-phosphate
  modified_base 13: mod_base = OTHER; note = adenosine-3'-phosphate
  modified_base 14: mod_base = OTHER; note = cytidine-3'-phosphate
  modified_base 15: mod_base = OTHER; note = adenosine-3'-phosphate
  modified_base 16: mod_base = OTHER; note = uridine-3'-phosphate
  modified_base 17: mod_base = OTHER; note = guanosine-3'-phosphate
  modified_base 18: mod_base = OTHER; note = adenosine-3'-phosphate
  modified_base 19: mod_base = OTHER; note = adenosine-3'-phosphate
  misc_feature 1..19: note = RNA
  misc_feature 20..21: note = DNA
tgcatgagtgggacatgaatt

SEQ ID NO: 1586 - DNA, 21 bp, synthetic construct
  source 1..21: mol_type = other DNA
  modified_base 1: mod_base = OTHER; note = uridine-3'-phosphate
  modified_base 2: mod_base = OTHER; note = guanosine-3'-phosphate
  modified_base 3: mod_base = OTHER; note = guanosine-3'-phosphate
  modified_base 4: mod_base = OTHER; note = cytidine-3'-phosphate
  modified_base 5: mod_base = OTHER; note = uridine-3'-phosphate
  modified_base 6: mod_base = OTHER; note = guanosine-3'-phosphate
  modified_base 7: mod_base = OTHER; note = cytidine-3'-phosphate
  modified_base 8: mod_base = OTHER; note = guanosine-3'-phosphate
  modified_base 9: mod_base = OTHER; note = cytidine-3'-phosphate
  modified_base 10: mod_base = OTHER; note = guanosine-3'-phosphate
  modified_base 11: mod_base = OTHER; note = guanosine-3'-phosphate
  modified_base 12: mod_base = OTHER; note = guanosine-3'-phosphate
  modified_base 13: mod_base = OTHER; note = cytidine-3'-phosphate
  modified_base 14: mod_base = OTHER; note = adenosine-3'-phosphate
  modified_base 15: mod_base = OTHER; note = uridine-3'-phosphate
  modified_base 16: mod_base = OTHER; note = guanosine-3'-phosphate
  modified_base 17: mod_base = OTHER; note = adenosine-3'-phosphate
  modified_base 18: mod_base = OTHER; note = guanosine-3'-phosphate
  modified_base 19: mod_base = OTHER; note = uridine-3'-phosphate
  misc_feature 1..19: note = RNA
  misc_feature 20..21: note = DNA
tggctgcgcgggcatgagttt

SEQ ID NO: 1587 - DNA, 21 bp, synthetic construct
  source 1..21: mol_type = other DNA
  modified_base 1: mod_base = OTHER; note = uridine-3'-phosphate
  modified_base 2: mod_base = OTHER; note = uridine-3'-phosphate
  modified_base 3: mod_base = OTHER; note = cytidine-3'-phosphate
  modified_base 4: mod_base = OTHER; note = guanosine-3'-phosphate
  modified_base 5: mod_base = OTHER; note = guanosine-3'-phosphate
  modified_base 6: mod_base = OTHER; note = cytidine-3'-phosphate
  modified_base 7: mod_base = OTHER; note = guanosine-3'-phosphate
  modified_base 8: mod_base = OTHER; note = guanosine-3'-phosphate
  modified_base 9: mod_base = OTHER; note = uridine-3'-phosphate
  modified_base 10: mod_base = OTHER; note = guanosine-3'-phosphate
  modified_base 11: mod_base = OTHER; note = cytidine-3'-phosphate
  modified_base 12: mod_base = OTHER; note = cytidine-3'-phosphate
  modified_base 13: mod_base = OTHER; note = guanosine-3'-phosphate
  modified_base 14: mod_base = OTHER; note = guanosine-3'-phosphate
  modified_base 15: mod_base = OTHER; note = cytidine-3'-phosphate
  modified_base 16: mod_base = OTHER; note = uridine-3'-phosphate
  modified_base 17: mod_base = OTHER; note = guanosine-3'-phosphate
  modified_base 18: mod_base = OTHER; note = cytidine-3'-phosphate
  modified_base 19: mod_base = OTHER; note = guanosine-3'-phosphate
  misc_feature 1..19: note = RNA
  misc_feature 20..21: note = DNA
ttcggcggtgccggctgcgtt

SEQ ID NO: 1588 - DNA, 21 bp, synthetic construct
  source 1..21: mol_type = other DNA
  modified_base 1: mod_base = OTHER; note = uridine-3'-phosphate
  modified_base 2: mod_base = OTHER; note = guanosine-3'-phosphate
  modified_base 3: mod_base = OTHER; note = guanosine-3'-phosphate
  modified_base 4: mod_base = OTHER; note = cytidine-3'-phosphate
  modified_base 5: mod_base = OTHER; note = uridine-3'-phosphate
  modified_base 6: mod_base = OTHER; note = guanosine-3'-phosphate
  modified_base 7: mod_base = OTHER; note = adenosine-3'-phosphate
  modified_base 8: mod_base = OTHER; note = guanosine-3'-phosphate
  modified_base 9: mod_base = OTHER; note = guanosine-3'-phosphate
  modified_base 10: mod_base = OTHER; note = cytidine-3'-phosphate
  modified_base 11: mod_base = OTHER; note = uridine-3'-phosphate
  modified_base 12: mod_base = OTHER; note = uridine-3'-phosphate
  modified_base 13: mod_base = OTHER; note = cytidine-3'-phosphate
  modified_base 14: mod_base = OTHER; note = guanosine-3'-phosphate
  modified_base 15: mod_base = OTHER; note = guanosine-3'-phosphate
  modified_base 16: mod_base = OTHER; note = cytidine-3'-phosphate
  modified_base 17: mod_base = OTHER; note = guanosine-3'-phosphate
  modified_base 18: mod_base = OTHER; note = guanosine-3'-phosphate
  modified_base 19: mod_base = OTHER; note = uridine-3'-phosphate
  misc_feature 1..19: note = RNA
  misc_feature 20..21: note = DNA
tggctgaggcttcggcggttt

SEQ ID NO: 1589 - DNA, 21 bp, synthetic construct
  source 1..21: mol_type = other DNA
  modified_base 1: mod_base = OTHER; note = uridine-3'-phosphate
  modified_base 2: mod_base = OTHER; note = guanosine-3'-phosphate
  modified_base 3: mod_base = OTHER; note = uridine-3'-phosphate
  modified_base 4: mod_base = OTHER; note = cytidine-3'-phosphate
  modified_base 5: mod_base = OTHER; note = cytidine-3'-phosphate
  modified_base 6: mod_base = OTHER; note = guanosine-3'-phosphate
  modified_base 7: mod_base = OTHER; note = guanosine-3'-phosphate
  modified_base 8: mod_base = OTHER; note = guanosine-3'-phosphate
  modified_base 9: mod_base = OTHER; note = uridine-3'-phosphate
  modified_base 10: mod_base = OTHER; note = cytidine-3'-phosphate
  modified_base 11: mod_base = OTHER; note = guanosine-3'-phosphate
  modified_base 12: mod_base = OTHER; note = uridine-3'-phosphate
  modified_base 13: mod_base = OTHER; note = guanosine-3'-phosphate
  modified_base 14: mod_base = OTHER; note = guanosine-3'-phosphate
  modified_base 15: mod_base = OTHER; note = guanosine-3'-phosphate
  modified_base 16: mod_base = OTHER; note = cytidine-3'-phosphate
  modified_base 17: mod_base = OTHER; note = uridine-3'-phosphate
  modified_base 18: mod_base = OTHER; note = guanosine-3'-phosphate
  modified_base 19: mod_base = OTHER; note = adenosine-3'-phosphate
  misc_feature 1..19: note = RNA
  misc_feature 20..21: note = DNA
tgtccgggtcgtgggctgatt

SEQ ID NO: 1590 - DNA, 21 bp, synthetic construct
  source 1..21: mol_type = other DNA
  modified_base 1: mod_base = OTHER; note = adenosine-3'-phosphate
  modified_base 2: mod_base = OTHER; note = cytidine-3'-phosphate
  modified_base 3: mod_base = OTHER; note = uridine-3'-phosphate
  modified_base 4: mod_base = OTHER; note = guanosine-3'-phosphate
  modified_base 5: mod_base = OTHER; note = adenosine-3'-phosphate
  modified_base 6: mod_base = OTHER; note = guanosine-3'-phosphate
  modified_base 7: mod_base = OTHER; note = guanosine-3'-phosphate
  modified_base 8: mod_base = OTHER; note = cytidine-3'-phosphate
  modified_base 9: mod_base = OTHER; note = guanosine-3'-phosphate
  modified_base 10: mod_base = OTHER; note = guanosine-3'-phosphate
  modified_base 11: mod_base = OTHER; note = guanosine-3'-phosphate
  modified_base 12: mod_base = OTHER; note = guanosine-3'-phosphate
  modified_base 13: mod_base = OTHER; note = uridine-3'-phosphate
  modified_base 14: mod_base = OTHER; note = cytidine-3'-phosphate
  modified_base 15: mod_base = OTHER; note = cytidine-3'-phosphate
  modified_base 16: mod_base = OTHER; note = guanosine-3'-phosphate
  modified_base 17: mod_base = OTHER; note = guanosine-3'-phosphate
  modified_base 18: mod_base = OTHER; note = guanosine-3'-phosphate
  modified_base 19: mod_base = OTHER; note = uridine-3'-phosphate
  misc_feature 1..19: note = RNA
  misc_feature 20..21: note = DNA
actgaggcggggtccgggttt

SEQ ID NO: 1591 - DNA, 21 bp, synthetic construct
  source 1..21: mol_type = other DNA
  modified_base 1: mod_base = OTHER; note = uridine-3'-phosphate
  modified_base 2: mod_base = OTHER; note = cytidine-3'-phosphate
  modified_base 3: mod_base = OTHER; note = guanosine-3'-phosphate
  modified_base 4: mod_base = OTHER; note = guanosine-3'-phosphate
  modified_base 5: mod_base = OTHER; note = guanosine-3'-phosphate
  modified_base 6: mod_base = OTHER; note = guanosine-3'-phosphate
  modified_base 7: mod_base = OTHER; note = uridine-3'-phosphate
  modified_base 8: mod_base = OTHER; note = cytidine-3'-phosphate
  modified_base 9: mod_base = OTHER; note = uridine-3'-phosphate
  modified_base 10: mod_base = OTHER; note = guanosine-3'-phosphate
  modified_base 11: mod_base = OTHER; note = guanosine-3'-phosphate
  modified_base 12: mod_base = OTHER; note = guanosine-3'-phosphate
  modified_base 13: mod_base = OTHER; note = adenosine-3'-phosphate
  modified_base 14: mod_base = OTHER; note = cytidine-3'-phosphate
  modified_base 15: mod_base = OTHER; note = uridine-3'-phosphate
  modified_base 16: mod_base = OTHER; note = guanosine-3'-phosphate
  modified_base 17: mod_base = OTHER; note = adenosine-3'-phosphate
  modified_base 18: mod_base = OTHER; note = guanosine-3'-phosphate
  modified_base 19: mod_base = OTHER; note = guanosine-3'-phosphate
  misc_feature 1..19: note = RNA
  misc_feature 20..21: note = DNA
tcggggtctgggactgaggtt

SEQ ID NO: 1592 - DNA, 21 bp, synthetic construct
  source 1..21: mol_type = other DNA
  modified_base 1: mod_base = OTHER; note = uridine-3'-phosphate
  modified_base 2: mod_base = OTHER; note = guanosine-3'-phosphate
  modified_base 3: mod_base = OTHER; note = cytidine-3'-phosphate
  modified_base 4: mod_base = OTHER; note = adenosine-3'-phosphate
  modified_base 5: mod_base = OTHER; note = adenosine-3'-phosphate
  modified_base 6: mod_base = OTHER; note = guanosine-3'-phosphate
  modified_base 7: mod_base = OTHER; note = guanosine-3'-phosphate
  modified_base 8: mod_base = OTHER; note = cytidine-3'-phosphate
  modified_base 9: mod_base = OTHER; note = uridine-3'-phosphate
  modified_base 10: mod_base = OTHER; note = cytidine-3'-phosphate
  modified_base 11: mod_base = OTHER; note = cytidine-3'-phosphate
  modified_base 12: mod_base = OTHER; note = cytidine-3'-phosphate
  modified_base 13: mod_base = OTHER; note = guanosine-3'-phosphate
  modified_base 14: mod_base = OTHER; note = guanosine-3'-phosphate
  modified_base 15: mod_base = OTHER; note = guanosine-3'-phosphate
  modified_base 16: mod_base = OTHER; note = guanosine-3'-phosphate
  modified_base 17: mod_base = OTHER; note = uridine-3'-phosphate
  modified_base 18: mod_base = OTHER; note = cytidine-3'-phosphate
  modified_base 19: mod_base = OTHER; note = uridine-3'-phosphate
  misc_feature 1..19: note = RNA
  misc_feature 20..21: note = DNA
tgcaaggctcccggggtcttt

SEQ ID NO: 1593 - DNA, 21 bp, synthetic construct
  source 1..21: mol_type = other DNA
  modified_base 1: mod_base = OTHER; note = uridine-3'-phosphate
  modified_base 2: mod_base = OTHER; note = cytidine-3'-phosphate
  modified_base 3: mod_base = OTHER; note = cytidine-3'-phosphate
  modified_base 4: mod_base = OTHER; note = cytidine-3'-phosphate
  modified_base 5: mod_base = OTHER; note = guanosine-3'-phosphate
  modified_base 6: mod_base = OTHER; note = cytidine-3'-phosphate
  modified_base 7: mod_base = OTHER; note = uridine-3'-phosphate
  modified_base 8: mod_base = OTHER; note = uridine-3'-phosphate
  modified_base 9: mod_base = OTHER; note = cytidine-3'-phosphate
  modified_base 10: mod_base = OTHER; note = guanosine-3'-phosphate
  modified_base 11: mod_base = OTHER; note = cytidine-3'-phosphate
  modified_base 12: mod_base = OTHER; note = cytidine-3'-phosphate
  modified_base 13: mod_base = OTHER; note = guanosine-3'-phosphate
  modified_base 14: mod_base = OTHER; note = guanosine-3'-phosphate
  modified_base 15: mod_base = OTHER; note = cytidine-3'-phosphate
  modified_base 16: mod_base = OTHER; note = adenosine-3'-phosphate
  modified_base 17: mod_base = OTHER; note = adenosine-3'-phosphate
  modified_base 18: mod_base = OTHER; note = guanosine-3'-phosphate
  modified_base 19: mod_base = OTHER; note = guanosine-3'-phosphate
  misc_feature 1..19: note = RNA
  misc_feature 20..21: note = DNA
tcccgcttcgccggcaaggtt

SEQ ID NO: 1594 - DNA, 21 bp, synthetic construct
  source 1..21: mol_type = other DNA
  modified_base 1: mod_base = OTHER; note = adenosine-3'-phosphate
  modified_base 2: mod_base = OTHER; note = adenosine-3'-phosphate
  modified_base 3: mod_base = OTHER; note = guanosine-3'-phosphate
  modified_base 4: mod_base = OTHER; note = guanosine-3'-phosphate
  modified_base 5: mod_base = OTHER; note = cytidine-3'-phosphate
  modified_base 6: mod_base = OTHER; note = guanosine-3'-phosphate
  modified_base 7: mod_base = OTHER; note = guanosine-3'-phosphate
  modified_base 8: mod_base = OTHER; note = cytidine-3'-phosphate
  modified_base 9: mod_base = OTHER; note = uridine-3'-phosphate
  modified_base 10: mod_base = OTHER; note = guanosine-3'-phosphate
  modified_base 11: mod_base = OTHER; note = cytidine-3'-phosphate
  modified_base 12: mod_base = OTHER; note = uridine-3'-phosphate
  modified_base 13: mod_base = OTHER; note = cytidine-3'-phosphate
  modified_base 14: mod_base = OTHER; note = cytidine-3'-phosphate
  modified_base 15: mod_base = OTHER; note = cytidine-3'-phosphate
  modified_base 16: mod_base = OTHER; note = guanosine-3'-phosphate
  modified_base 17: mod_base = OTHER; note = cytidine-3'-phosphate
  modified_base 18: mod_base = OTHER; note = uridine-3'-phosphate
  modified_base 19: mod_base = OTHER; note = uridine-3'-phosphate
  misc_feature 1..19: note = RNA
  misc_feature 20..21: note = DNA
aaggcggctgctcccgctttt

SEQ ID NO: 1595 - DNA, 21 bp, synthetic construct
  source 1..21: mol_type = other DNA
  modified_base 1: mod_base = OTHER; note = uridine-3'-phosphate
  modified_base 2: mod_base = OTHER; note = uridine-3'-phosphate
  modified_base 3: mod_base = OTHER; note = guanosine-3'-phosphate
  modified_base 4: mod_base = OTHER; note = guanosine-3'-phosphate
  modified_base 5: mod_base = OTHER; note = uridine-3'-phosphate
  modified_base 6: mod_base = OTHER; note = cytidine-3'-phosphate
  modified_base 7: mod_base = OTHER; note = adenosine-3'-phosphate
  modified_base 8: mod_base = OTHER; note = guanosine-3'-phosphate
  modified_base 9: mod_base = OTHER; note = guanosine-3'-phosphate
  modified_base 10: mod_base = OTHER; note = guanosine-3'-phosphate
  modified_base 11: mod_base = OTHER; note = adenosine-3'-phosphate
  modified_base 12: mod_base = OTHER; note = adenosine-3'-phosphate
  modified_base 13: mod_base = OTHER; note = guanosine-3'-phosphate
  modified_base 14: mod_base = OTHER; note = guanosine-3'-phosphate
  modified_base 15: mod_base = OTHER; note = cytidine-3'-phosphate
  modified_base 16: mod_base = OTHER; note = guanosine-3'-phosphate
  modified_base 17: mod_base = OTHER; note = guanosine-3'-phosphate
  modified_base 18: mod_base = OTHER; note = cytidine-3'-phosphate
  modified_base 19: mod_base = OTHER; note = uridine-3'-phosphate
  misc_feature 1..19: note = RNA
  misc_feature 20..21: note = DNA
ttggtcagggaaggcggcttt

SEQ ID NO: 1596 - DNA, 21 bp, synthetic construct
  source 1..21: mol_type = other DNA
  modified_base 1: mod_base = OTHER; note = adenosine-3'-phosphate
  modified_base 2: mod_base = OTHER; note = guanosine-3'-phosphate
  modified_base 3: mod_base = OTHER; note = uridine-3'-phosphate
  modified_base 4: mod_base = OTHER; note = guanosine-3'-phosphate
  modified_base 5: mod_base = OTHER; note = guanosine-3'-phosphate
  modified_base 6: mod_base = OTHER; note = guanosine-3'-phosphate
  modified_base 7: mod_base = OTHER; note = cytidine-3'-phosphate
  modified_base 8: mod_base = OTHER; note = cytidine-3'-phosphate
  modified_base 9: mod_base = OTHER; note = guanosine-3'-phosphate
  modified_base 10: mod_base = OTHER; note = uridine-3'-phosphate
  modified_base 11: mod_base = OTHER; note = uridine-3'-phosphate
  modified_base 12: mod_base = OTHER; note = cytidine-3'-phosphate
  modified_base 13: mod_base = OTHER; note = cytidine-3'-phosphate
  modified_base 14: mod_base = OTHER; note = uridine-3'-phosphate
  modified_base 15: mod_base = OTHER; note = guanosine-3'-phosphate
  modified_base 16: mod_base = OTHER; note = guanosine-3'-phosphate
  modified_base 17: mod_base = OTHER; note = uridine-3'-phosphate
  modified_base 18: mod_base = OTHER; note = cytidine-3'-phosphate
  modified_base 19: mod_base = OTHER; note = adenosine-3'-phosphate
  misc_feature 1..19: note = RNA
  misc_feature 20..21: note = DNA
agtgggccgttcctggtcatt

SEQ ID NO: 1597 - DNA, 21 bp, synthetic construct
  source 1..21: mol_type = other DNA
  modified_base 1: mod_base = OTHER; note = uridine-3'-phosphate
  modified_base 2: mod_base = OTHER; note = cytidine-3'-phosphate
  modified_base 3: mod_base = OTHER; note = cytidine-3'-phosphate
  modified_base 4: mod_base = OTHER; note = guanosine-3'-phosphate
  modified_base 5: mod_base = OTHER; note = cytidine-3'-phosphate
  modified_base 6: mod_base = OTHER; note = adenosine-3'-phosphate
  modified_base 7: mod_base = OTHER; note = guanosine-3'-phosphate
  modified_base 8: mod_base = OTHER; note = cytidine-3'-phosphate
  modified_base 9: mod_base = OTHER; note = uridine-3'-phosphate
  modified_base 10: mod_base = OTHER; note = cytidine-3'-phosphate
  modified_base 11: mod_base = OTHER; note = adenosine-3'-phosphate
  modified_base 12: mod_base = OTHER; note = guanosine-3'-phosphate
  modified_base 13: mod_base = OTHER; note = uridine-3'-phosphate
  modified_base 14: mod_base = OTHER; note = guanosine-3'-phosphate
  modified_base 15: mod_base = OTHER; note = guanosine-3'-phosphate
  modified_base 16: mod_base = OTHER; note = guanosine-3'-phosphate
  modified_base 17: mod_base = OTHER; note = cytidine-3'-phosphate
  modified_base 18: mod_base = OTHER; note = cytidine-3'-phosphate
  modified_base 19: mod_base = OTHER; note = guanosine-3'-phosphate
  misc_feature 1..19: note = RNA
  misc_feature 20..21: note = DNA
tccgcagctcagtgggccgtt

SEQ ID NO: 1598 - DNA, 21 bp, synthetic construct
  source 1..21: mol_type = other DNA
  modified_base 1: mod_base = OTHER; note = uridine-3'-phosphate
  modified_base 2: mod_base = OTHER; note = guanosine-3'-phosphate
  modified_base 3: mod_base = OTHER; note = cytidine-3'-phosphate
  modified_base 4: mod_base = OTHER; note = guanosine-3'-phosphate
  modified_base 5: mod_base = OTHER; note = guanosine-3'-phosphate
  modified_base 6: mod_base = OTHER; note = adenosine-3'-phosphate
  modified_base 7: mod_base = OTHER; note = guanosine-3'-phosphate
  modified_base 8: mod_base = OTHER; note = cytidine-3'-phosphate
  modified_base 9: mod_base = OTHER; note = cytidine-3'-phosphate
  modified_base 10: mod_base = OTHER; note = guanosine-3'-phosphate
  modified_base 11: mod_base = OTHER; note = cytidine-3'-phosphate
  modified_base 12: mod_base = OTHER; note = uridine-3'-phosphate
  modified_base 13: mod_base = OTHER; note = guanosine-3'-phosphate
  modified_base 14: mod_base = OTHER; note = cytidine-3'-phosphate
  modified_base 15: mod_base = OTHER; note = cytidine-3'-phosphate
  modified_base 16: mod_base = OTHER; note = cytidine-3'-phosphate
  modified_base 17: mod_base = OTHER; note = guanosine-3'-phosphate
  modified_base 18: mod_base = OTHER; note = cytidine-3'-phosphate
  modified_base 19: mod_base = OTHER; note = adenosine-3'-phosphate
  misc_feature 1..19: note = RNA
  misc_feature 20..21: note = DNA
tgcggagccgctgcccgcatt

SEQ ID NO: 1599 - DNA, 21 bp, synthetic construct
  source 1..21: mol_type = other DNA
  modified_base 1: mod_base = OTHER; note = adenosine-3'-phosphate
  modified_base 2: mod_base = OTHER; note = cytidine-3'-phosphate
  modified_base 3: mod_base = OTHER; note = adenosine-3'-phosphate
  modified_base 4: mod_base = OTHER; note = guanosine-3'-phosphate
  modified_base 5: mod_base = OTHER; note = adenosine-3'-phosphate
  modified_base 6: mod_base = OTHER; note = cytidine-3'-phosphate
  modified_base 7: mod_base = OTHER; note = uridine-3'-phosphate
  modified_base 8: mod_base = OTHER; note = cytidine-3'-phosphate
  modified_base 9: mod_base = OTHER; note = uridine-3'-phosphate
  modified_base 10: mod_base = OTHER; note = uridine-3'-phosphate
  modified_base 11: mod_base = OTHER; note = guanosine-3'-phosphate
  modified_base 12: mod_base = OTHER; note = cytidine-3'-phosphate
  modified_base 13: mod_base = OTHER; note = guanosine-3'-phosphate
  modified_base 14: mod_base = OTHER; note = guanosine-3'-phosphate
  modified_base 15: mod_base = OTHER; note = adenosine-3'-phosphate
  modified_base 16: mod_base = OTHER; note = guanosine-3'-phosphate
  modified_base 17: mod_base = OTHER; note = cytidine-3'-phosphate
  modified_base 18: mod_base = OTHER; note = cytidine-3'-phosphate
  modified_base 19: mod_base = OTHER; note = guanosine-3'-phosphate
  misc_feature 1..19: note = RNA
  misc_feature 20..21: note = DNA
acagactcttgcggagccgtt

SEQ ID NO: 1600 - DNA, 21 bp, synthetic construct
  source 1..21: mol_type = other DNA
  modified_base 1: mod_base = OTHER; note = uridine-3'-phosphate
  modified_base 2: mod_base = OTHER; note = guanosine-3'-phosphate
  modified_base 3: mod_base = OTHER; note = guanosine-3'-phosphate
  modified_base 4: mod_base = OTHER; note = uridine-3'-phosphate
  modified_base 5: mod_base = OTHER; note = cytidine-3'-phosphate
  modified_base 6: mod_base = OTHER; note = adenosine-3'-phosphate
  modified_base 7: mod_base = OTHER; note = uridine-3'-phosphate
  modified_base 8: mod_base = OTHER; note = cytidine-3'-phosphate
  modified_base 9: mod_base = OTHER; note = guanosine-3'-phosphate
  modified_base 10: mod_base = OTHER; note = adenosine-3'-phosphate
  modified_base 11: mod_base = OTHER; note = adenosine-3'-phosphate
  modified_base 12: mod_base = OTHER; note = guanosine-3'-phosphate
  modified_base 13: mod_base = OTHER; note = adenosine-3'-phosphate
  modified_base 14: mod_base = OTHER; note = cytidine-3'-phosphate
  modified_base 15: mod_base = OTHER; note = adenosine-3'-phosphate
  modified_base 16: mod_base = OTHER; note = guanosine-3'-phosphate
  modified_base 17: mod_base = OTHER; note = adenosine-3'-phosphate
  modified_base 18: mod_base = OTHER; note = cytidine-3'-phosphate
  modified_base 19: mod_base = OTHER; note = uridine-3'-phosphate
  misc_feature 1..19: note = RNA
  misc_feature 20..21: note = DNA
tggtcatcgaagacagacttt

SEQ ID NO: 1601 - DNA, 21 bp, synthetic construct
  source 1..21: mol_type = other DNA
  modified_base 1: mod_base = OTHER; note = uridine-3'-phosphate
  modified_base 2: mod_base = OTHER; note = cytidine-3'-phosphate
  modified_base 3: mod_base = OTHER; note = adenosine-3'-phosphate
  modified_base 4: mod_base = OTHER; note = adenosine-3'-phosphate
  modified_base 5: mod_base = OTHER; note = cytidine-3'-phosphate
  modified_base 6: mod_base = OTHER; note = guanosine-3'-phosphate
  modified_base 7: mod_base = OTHER; note = adenosine-3'-phosphate
  modified_base 8: mod_base = OTHER; note = cytidine-3'-phosphate
  modified_base 9: mod_base = OTHER; note = guanosine-3'-phosphate
  modified_base 10: mod_base = OTHER; note = cytidine-3'-phosphate
  modified_base 11: mod_base = OTHER; note = guanosine-3'-phosphate
  modified_base 12: mod_base = OTHER; note = guanosine-3'-phosphate
  modified_base 13: mod_base = OTHER; note = guanosine-3'-phosphate
  modified_base 14: mod_base = OTHER; note = uridine-3'-phosphate
  modified_base 15: mod_base = OTHER; note = cytidine-3'-phosphate
  modified_base 16: mod_base = OTHER; note = adenosine-3'-phosphate
  modified_base 17: mod_base = OTHER; note = uridine-3'-phosphate
  modified_base 18: mod_base = OTHER; note = cytidine-3'-phosphate
  modified_base 19: mod_base = OTHER; note = guanosine-3'-phosphate
  misc_feature 1..19: note = RNA
  misc_feature 20..21: note = DNA
tcaacgacgcgggtcatcgtt

SEQ ID NO: 1602 - DNA, 21 bp, synthetic construct
  source 1..21: mol_type = other DNA
  modified_base 1: mod_base = OTHER; note = uridine-3'-phosphate
  modified_base 2: mod_base = OTHER; note = cytidine-3'-phosphate
  modified_base 3: mod_base = OTHER; note = cytidine-3'-phosphate
  modified_base 4: mod_base = OTHER; note = adenosine-3'-phosphate
  modified_base 5: mod_base = OTHER; note = cytidine-3'-phosphate
  modified_base 6: mod_base = OTHER; note = cytidine-3'-phosphate
  modified_base 7: mod_base = OTHER; note = adenosine-3'-phosphate
  modified_base 8: mod_base = OTHER; note = guanosine-3'-phosphate
  modified_base 9: mod_base = OTHER; note = cytidine-3'-phosphate
  modified_base 10: mod_base = OTHER; note = cytidine-3'-phosphate
  modified_base 11: mod_base = OTHER; note = cytidine-3'-phosphate
  modified_base 12: mod_base = OTHER; note = guanosine-3'-phosphate
  modified_base 13: mod_base = OTHER; note = cytidine-3'-phosphate
  modified_base 14: mod_base = OTHER; note = cytidine-3'-phosphate
  modified_base 15: mod_base = OTHER; note = adenosine-3'-phosphate
  modified_base 16: mod_base = OTHER; note = adenosine-3'-phosphate
  modified_base 17: mod_base = OTHER; note = cytidine-3'-phosphate
  modified_base 18: mod_base = OTHER; note = guanosine-3'-phosphate
  modified_base 19: mod_base = OTHER; note = adenosine-3'-phosphate
  misc_feature 1..19: note = RNA
  misc_feature 20..21: note = DNA
tccaccagcccgccaacgatt

SEQ ID NO: 1603 - DNA, 21 bp, synthetic construct
  source 1..21: mol_type = other DNA
  modified_base 1: mod_base = OTHER; note = uridine-3'-phosphate
  modified_base 2: mod_base = OTHER; note = cytidine-3'-phosphate
  modified_base 3: mod_base = OTHER; note = cytidine-3'-phosphate
  modified_base 4: mod_base = OTHER; note = cytidine-3'-phosphate
  modified_base 5: mod_base = OTHER; note = cytidine-3'-phosphate
  modified_base 6: mod_base = OTHER; note = guanosine-3'-phosphate
  modified_base 7: mod_base = OTHER; note = cytidine-3'-phosphate
  modified_base 8: mod_base = OTHER; note = guanosine-3'-phosphate
  modified_base 9: mod_base = OTHER; note = uridine-3'-phosphate
  modified_base 10: mod_base = OTHER; note = adenosine-3'-phosphate
  modified_base 11: mod_base = OTHER; note = guanosine-3'-phosphate
  modified_base 12: mod_base = OTHER; note = cytidine-3'-phosphate
  modified_base 13: mod_base = OTHER; note = guanosine-3'-phosphate
  modified_base 14: mod_base = OTHER; note = cytidine-3'-phosphate
  modified_base 15: mod_base = OTHER; note = cytidine-3'-phosphate
  modified_base 16: mod_base = OTHER; note = adenosine-3'-phosphate
  modified_base 17: mod_base = OTHER; note = cytidine-3'-phosphate
  modified_base 18: mod_base = OTHER; note = cytidine-3'-phosphate
  modified_base 19: mod_base = OTHER; note = adenosine-3'-phosphate
  misc_feature 1..19: note = RNA
  misc_feature 20..21: note = DNA
tccccgcgtagcgccaccatt

SEQ ID NO: 1604 - DNA, 21 bp, synthetic construct
  source 1..21: mol_type = other DNA
  modified_base 1: mod_base = OTHER; note = uridine-3'-phosphate
  modified_base 2: mod_base = OTHER; note = adenosine-3'-phosphate
  modified_base 3: mod_base = OTHER; note = guanosine-3'-phosphate
  modified_base 4: mod_base = OTHER; note = guanosine-3'-phosphate
  modified_base 5: mod_base = OTHER; note = guanosine-3'-phosphate
  modified_base 6: mod_base = OTHER; note = guanosine-3'-phosphate
  modified_base 7: mod_base = OTHER; note = uridine-3'-phosphate
  modified_base 8: mod_base = OTHER; note = guanosine-3'-phosphate
  modified_base 9: mod_base = OTHER; note = cytidine-3'-phosphate
  modified_base 10: mod_base = OTHER; note = guanosine-3'-phosphate
  modified_base 11: mod_base = OTHER; note = cytidine-3'-phosphate
  modified_base 12: mod_base = OTHER; note = cytidine-3'-phosphate
  modified_base 13: mod_base = OTHER; note = cytidine-3'-phosphate
  modified_base 14: mod_base = OTHER; note = cytidine-3'-phosphate
  modified_base 15: mod_base = OTHER; note = guanosine-3'-phosphate
  modified_base 16: mod_base = OTHER; note = cytidine-3'-phosphate
  modified_base 17: mod_base = OTHER; note = guanosine-3'-phosphate
  modified_base 18: mod_base = OTHER; note = uridine-3'-phosphate
  modified_base 19: mod_base = OTHER; note = adenosine-3'-phosphate
  misc_feature 1..19: note = RNA
  misc_feature 20..21: note = DNA
taggggtgcgccccgcgtatt

SEQ ID NO: 1605 - DNA, 21 bp, synthetic construct
  source 1..21: mol_type = other DNA
  modified_base 1: mod_base = OTHER; note = adenosine-3'-phosphate
  modified_base 2: mod_base = OTHER; note = guanosine-3'-phosphate
  modified_base 3: mod_base = OTHER; note = cytidine-3'-phosphate
  modified_base 4: mod_base = OTHER; note = guanosine-3'-phosphate
  modified_base 5: mod_base = OTHER; note = cytidine-3'-phosphate
  modified_base 6: mod_base = OTHER; note = guanosine-3'-phosphate
  modified_base 7: mod_base = OTHER; note = guanosine-3'-phosphate
  modified_base 8: mod_base = OTHER; note = cytidine-3'-phosphate
  modified_base 9: mod_base = OTHER; note = guanosine-3'-phosphate
  modified_base 10: mod_base = OTHER; note = adenosine-3'-phosphate
  modified_base 11: mod_base = OTHER; note = uridine-3'-phosphate
  modified_base 12: mod_base = OTHER; note = guanosine-3'-phosphate
  modified_base 13: mod_base = OTHER; note = uridine-3'-phosphate
  modified_base 14: mod_base = OTHER; note = adenosine-3'-phosphate
  modified_base 15: mod_base = OTHER; note = guanosine-3'-phosphate
  modified_base 16: mod_base = OTHER; note = guanosine-3'-phosphate
  modified_base 17: mod_base = OTHER; note = guanosine-3'-phosphate
  modified_base 18: mod_base = OTHER; note = guanosine-3'-phosphate
  modified_base 19: mod_base = OTHER; note = uridine-3'-phosphate
  misc_feature 1..19: note = RNA
  misc_feature 20..21: note = DNA
agcgcggcgatgtaggggttt

SEQ ID NO: 1606 - DNA, 21 bp, synthetic construct
  source 1..21: mol_type = other DNA
  modified_base 1: mod_base = OTHER; note = uridine-3'-phosphate
  modified_base 2: mod_base = OTHER; note = guanosine-3'-phosphate
  modified_base 3: mod_base = OTHER; note = cytidine-3'-phosphate
  modified_base 4: mod_base = OTHER; note = cytidine-3'-phosphate
  modified_base 5: mod_base = OTHER; note = cytidine-3'-phosphate
  modified_base 6: mod_base = OTHER; note = cytidine-3'-phosphate
  modified_base 7: mod_base = OTHER; note = adenosine-3'-phosphate
  modified_base 8: mod_base = OTHER; note = guanosine-3'-phosphate
  modified_base 9: mod_base = OTHER; note = uridine-3'-phosphate
  modified_base 10: mod_base = OTHER; note = adenosine-3'-phosphate
  modified_base 11: mod_base = OTHER; note = cytidine-3'-phosphate
  modified_base 12: mod_base = OTHER; note = adenosine-3'-phosphate
  modified_base 13: mod_base = OTHER; note = guanosine-3'-phosphate
  modified_base 14: mod_base = OTHER; note = cytidine-3'-phosphate
  modified_base 15: mod_base = OTHER; note = guanosine-3'-phosphate
  modified_base 16: mod_base = OTHER; note = cytidine-3'-phosphate
  modified_base 17: mod_base = OTHER; note = guanosine-3'-phosphate
  modified_base 18: mod_base = OTHER; note = guanosine-3'-phosphate
  modified_base 19: mod_base = OTHER; note = cytidine-3'-phosphate
  misc_feature 1..19: note = RNA
  misc_feature 20..21: note = DNA
tgccccagtacagcgcggctt

SEQ ID NO: 1607 - DNA, 21 bp, synthetic construct
  source 1..21: mol_type = other DNA
  modified_base 1: mod_base = OTHER; note = uridine-3'-phosphate
  modified_base 2: mod_base = OTHER; note = cytidine-3'-phosphate
  modified_base 3: mod_base = OTHER; note = adenosine-3'-phosphate
  modified_base 4: mod_base = OTHER; note = guanosine-3'-phosphate
  modified_base 5: mod_base = OTHER; note = adenosine-3'-phosphate
  modified_base 6: mod_base = OTHER; note = adenosine-3'-phosphate
  modified_base 7: mod_base = OTHER; note = adenosine-3'-phosphate
  modified_base 8: mod_base = OTHER; note = cytidine-3'-phosphate
  modified_base 9: mod_base = OTHER; note = uridine-3'-phosphate
  modified_base 10: mod_base = OTHER; note = guanosine-3'-phosphate
  modified_base 11: mod_base = OTHER; note = uridine-3'-phosphate
  modified_base 12: mod_base = OTHER; note = guanosine-3'-phosphate
  modified_base 13: mod_base = OTHER; note = guanosine-3'-phosphate
  modified_base 14: mod_base = OTHER; note = cytidine-3'-phosphate
  modified_base 15: mod_base = OTHER; note = cytidine-3'-phosphate
  modified_base 16: mod_base = OTHER; note = cytidine-3'-phosphate
  modified_base 17: mod_base = OTHER; note = cytidine-3'-phosphate
  modified_base 18: mod_base = OTHER; note = adenosine-3'-phosphate
  modified_base 19: mod_base = OTHER; note = guanosine-3'-phosphate
  misc_feature 1..19: note = RNA
  misc_feature 20..21: note = DNA
tcagaaactgtggccccagtt

SEQ ID NO: 1608 - DNA, 21 bp, synthetic construct
  source 1..21: mol_type = other DNA
  modified_base 1: mod_base = OTHER; note = uridine-3'-phosphate
  modified_base 2: mod_base = OTHER; note = adenosine-3'-phosphate
  modified_base 3: mod_base = OTHER; note = guanosine-3'-phosphate
  modified_base 4: mod_base = OTHER; note = guanosine-3'-phosphate
  modified_base 5: mod_base = OTHER; note = cytidine-3'-phosphate
  modified_base 6: mod_base = OTHER; note = uridine-3'-phosphate
  modified_base 7: mod_base = OTHER; note = guanosine-3'-phosphate
  modified_base 8: mod_base = OTHER; note = cytidine-3'-phosphate
  modified_base 9: mod_base = OTHER; note = cytidine-3'-phosphate
  modified_base 10: mod_base = OTHER; note = guanosine-3'-phosphate
  modified_base 11: mod_base = OTHER; note = guanosine-3'-phosphate
  modified_base 12: mod_base = OTHER; note = cytidine-3'-phosphate
  modified_base 13: mod_base = OTHER; note = guanosine-3'-phosphate
  modified_base 14: mod_base = OTHER; note = cytidine-3'-phosphate
  modified_base 15: mod_base = OTHER; note = adenosine-3'-phosphate
  modified_base 16: mod_base = OTHER; note = guanosine-3'-phosphate
  modified_base 17: mod_base = OTHER; note = adenosine-3'-phosphate
  modified_base 18: mod_base = OTHER; note = adenosine-3'-phosphate
  modified_base 19: mod_base = OTHER; note = adenosine-3'-phosphate
  misc_feature 1..19: note = RNA
  misc_feature 20..21: note = DNA
taggctgccggcgcagaaatt

SEQ ID NO: 1609 - DNA, 21 bp, synthetic construct
  source 1..21: mol_type = other DNA
  modified_base 1: mod_base = OTHER; note = uridine-3'-phosphate
  modified_base 2: mod_base = OTHER; note = guanosine-3'-phosphate
  modified_base 3: mod_base = OTHER; note = guanosine-3'-phosphate
  modified_base 4: mod_base = OTHER; note = guanosine-3'-phosphate
  modified_base 5: mod_base = OTHER; note = guanosine-3'-phosphate
  modified_base 6: mod_base = OTHER; note = cytidine-3'-phosphate
  modified_base 7: mod_base = OTHER; note = guanosine-3'-phosphate
  modified_base 8: mod_base = OTHER; note = adenosine-3'-phosphate
  modified_base 9: mod_base = OTHER; note = uridine-3'-phosphate
  modified_base 10: mod_base = OTHER; note = guanosine-3'-phosphate
  modified_base 11: mod_base = OTHER; note = adenosine-3'-phosphate
  modified_base 12: mod_base = OTHER; note = guanosine-3'-phosphate
  modified_base 13: mod_base = OTHER; note = guanosine-3'-phosphate
  modified_base 14: mod_base = OTHER; note = cytidine-3'-phosphate
  modified_base 15: mod_base = OTHER; note = uridine-3'-phosphate
  modified_base 16: mod_base = OTHER; note = guanosine-3'-phosphate
  modified_base 17: mod_base = OTHER; note = cytidine-3'-phosphate
  modified_base 18: mod_base = OTHER; note = cytidine-3'-phosphate
  modified_base 19: mod_base = OTHER; note = guanosine-3'-phosphate
  misc_feature 1..19: note = RNA
  misc_feature 20..21: note = DNA
tggggcgatgaggctgccgtt

SEQ ID NO: 1610 - DNA, 21 bp, synthetic construct
  source 1..21: mol_type = other DNA
  modified_base 1: mod_base = OTHER; note = adenosine-3'-phosphate
  modified_base 2: mod_base = OTHER; note = guanosine-3'-phosphate
  modified_base 3: mod_base = OTHER; note = cytidine-3'-phosphate
  modified_base 4: mod_base = OTHER; note = adenosine-3'-phosphate
  modified_base 5: mod_base = OTHER; note = cytidine-3'-phosphate
  modified_base 6: mod_base = OTHER; note = cytidine-3'-phosphate
  modified_base 7: mod_base = OTHER; note = cytidine-3'-phosphate
  modified_base 8: mod_base = OTHER; note = adenosine-3'-phosphate
  modified_base 9: mod_base = OTHER; note = guanosine-3'-phosphate
  modified_base 10: mod_base = OTHER; note = cytidine-3'-phosphate
  modified_base 11: mod_base = OTHER; note = adenosine-3'-phosphate
  modified_base 12: mod_base = OTHER; note = guanosine-3'-phosphate
  modified_base 13: mod_base = OTHER; note = guanosine-3'-phosphate
  modified_base 14: mod_base = OTHER; note = guanosine-3'-phosphate
  modified_base 15: mod_base = OTHER; note = guanosine-3'-phosphate
  modified_base 16: mod_base = OTHER; note = guanosine-3'-phosphate
  modified_base 17: mod_base = OTHER; note = cytidine-3'-phosphate
  modified_base 18: mod_base = OTHER; note = guanosine-3'-phosphate
  modified_base 19: mod_base = OTHER; note = adenosine-3'-phosphate
  misc_feature 1..19: note = RNA
  misc_feature 20..21: note = DNA
agcacccagcagggggcgatt

SEQ ID NO: 1611 - DNA, 21 bp, synthetic construct
  source 1..21: mol_type = other DNA
  modified_base 1: mod_base = OTHER; note = uridine-3'-phosphate
  modified_base 2: mod_base = OTHER; note = adenosine-3'-phosphate
  modified_base 3: mod_base = OTHER; note = guanosine-3'-phosphate
  modified_base 4: mod_base = OTHER; note = cytidine-3'-phosphate
  modified_base 5: mod_base = OTHER; note = guanosine-3'-phosphate
  modified_base 6: mod_base = OTHER; note = guanosine-3'-phosphate
  modified_base 7: mod_base = OTHER; note = cytidine-3'-phosphate
  modified_base 8: mod_base = OTHER; note = cytidine-3'-phosphate
  modified_base 9: mod_base = OTHER; note = guanosine-3'-phosphate
  modified_base 10: mod_base = OTHER; note = uridine-3'-phosphate
  modified_base 11: mod_base = OTHER; note = cytidine-3'-phosphate
  modified_base 12: mod_base = OTHER; note = adenosine-3'-phosphate
  modified_base 13: mod_base = OTHER; note = guanosine-3'-phosphate
  modified_base 14: mod_base = OTHER; note = cytidine-3'-phosphate
  modified_base 15: mod_base = OTHER; note = adenosine-3'-phosphate
  modified_base 16: mod_base = OTHER; note = cytidine-3'-phosphate
  modified_base 17: mod_base = OTHER; note = cytidine-3'-phosphate
  modified_base 18: mod_base = OTHER; note = cytidine-3'-phosphate
  modified_base 19: mod_base = OTHER; note = adenosine-3'-phosphate
  misc_feature 1..19: note = RNA
  misc_feature 20..21: note = DNA
tagcggccgtcagcacccatt

SEQ ID NO: 1612 - DNA, 21 bp, synthetic construct
  source 1..21: mol_type = other DNA
  modified_base 1: mod_base = OTHER; note = uridine-3'-phosphate
  modified_base 2: mod_base = OTHER; note = cytidine-3'-phosphate
  modified_base 3: mod_base = OTHER; note = uridine-3'-phosphate
  modified_base 4: mod_base = OTHER; note = guanosine-3'-phosphate
  modified_base 5: mod_base = OTHER; note = cytidine-3'-phosphate
  modified_base 6: mod_base = OTHER; note = adenosine-3'-phosphate
  modified_base 7: mod_base = OTHER; note = guanosine-3'-phosphate
  modified_base 8: mod_base = OTHER; note = guanosine-3'-phosphate
  modified_base 9: mod_base = OTHER; note = cytidine-3'-phosphate
  modified_base 10: mod_base = OTHER; note = adenosine-3'-phosphate
  modified_base 11: mod_base = OTHER; note = guanosine-3'-phosphate
  modified_base 12: mod_base = OTHER; note = uridine-3'-phosphate
  modified_base 13: mod_base = OTHER; note = guanosine-3'-phosphate
  modified_base 14: mod_base = OTHER; note = adenosine-3'-phosphate
  modified_base 15: mod_base = OTHER; note = guanosine-3'-phosphate
  modified_base 16: mod_base = OTHER; note = cytidine-3'-phosphate
  modified_base 17: mod_base = OTHER; note = guanosine-3'-phosphate
  modified_base 18: mod_base = OTHER; note = guanosine-3'-phosphate
  modified_base 19: mod_base = OTHER; note = cytidine-3'-phosphate
  misc_feature 1..19: note = RNA
  misc_feature 20..21: note = DNA
tctgcaggcagtgagcggctt

SEQ ID NO: 1613 - DNA, 21 bp, synthetic construct
  source 1..21: mol_type = other DNA
  modified_base 1: mod_base = OTHER; note = uridine-3'-phosphate
  modified_base 2: mod_base = OTHER; note = uridine-3'-phosphate
  modified_base 3: mod_base = OTHER; note = guanosine-3'-phosphate
  modified_base 4: mod_base = OTHER; note = cytidine-3'-phosphate
  modified_base 5: mod_base = OTHER; note = guanosine-3'-phosphate
  modified_base 6: mod_base = OTHER; note = guanosine-3'-phosphate
  modified_base 7: mod_base = OTHER; note = guanosine-3'-phosphate
  modified_base 8: mod_base = OTHER; note = cytidine-3'-phosphate
  modified_base 9: mod_base = OTHER; note = cytidine-3'-phosphate
  modified_base 10: mod_base = OTHER; note = guanosine-3'-phosphate
  modified_base 11: mod_base = OTHER; note = guanosine-3'-phosphate
  modified_base 12: mod_base = OTHER; note = uridine-3'-phosphate
  modified_base 13: mod_base = OTHER; note = cytidine-3'-phosphate
  modified_base 14: mod_base = OTHER; note = cytidine-3'-phosphate
  modified_base 15: mod_base = OTHER; note = uridine-3'-phosphate
  modified_base 16: mod_base = OTHER; note = guanosine-3'-phosphate
  modified_base 17: mod_base = OTHER; note = cytidine-3'-phosphate
  modified_base 18: mod_base = OTHER; note = adenosine-3'-phosphate
  modified_base 19: mod_base = OTHER; note = guanosine-3'-phosphate
  misc_feature 1..19: note = RNA
  misc_feature 20..21: note = DNA
ttgcgggccggtcctgcagtt

SEQ ID NO: 1614 - DNA, 21 bp, synthetic construct
  source 1..21: mol_type = other DNA
  modified_base 1: mod_base = OTHER; note = adenosine-3'-phosphate
  modified_base 2: mod_base = OTHER; note = guanosine-3'-phosphate
  modified_base 3: mod_base = OTHER; note = adenosine-3'-phosphate
  modified_base 4: mod_base = OTHER; note = uridine-3'-phosphate
  modified_base 5: mod_base = OTHER; note = cytidine-3'-phosphate
  modified_base 6: mod_base = OTHER; note = cytidine-3'-phosphate
  modified_base 7: mod_base = OTHER; note = uridine-3'-phosphate
  modified_base 8: mod_base = OTHER; note = cytidine-3'-phosphate
  modified_base 9: mod_base = OTHER; note = guanosine-3'-phosphate
  modified_base 10: mod_base = OTHER; note = guanosine-3'-phosphate
  modified_base 11: mod_base = OTHER; note = guanosine-3'-phosphate
  modified_base 12: mod_base = OTHER; note = uridine-3'-phosphate
  modified_base 13: mod_base = OTHER; note = guanosine-3'-phosphate
  modified_base 14: mod_base = OTHER; note = cytidine-3'-phosphate
  modified_base 15: mod_base = OTHER; note = guanosine-3'-phosphate
  modified_base 16: mod_base = OTHER; note = guanosine-3'-phosphate
  modified_base 17: mod_base = OTHER; note = guanosine-3'-phosphate
  modified_base 18: mod_base = OTHER; note = cytidine-3'-phosphate
  modified_base 19: mod_base = OTHER; note = cytidine-3'-phosphate
  misc_feature 1..19: note = RNA
  misc_feature 20..21: note = DNA
agatcctcgggtgcgggcctt

SEQ ID NO: 1615 - DNA, 21 bp, synthetic construct
  source 1..21: mol_type = other DNA
  modified_base 1: mod_base = OTHER; note = uridine-3'-phosphate
  modified_base 2: mod_base = OTHER; note = adenosine-3'-phosphate
  modified_base 3: mod_base = OTHER; note = cytidine-3'-phosphate
  modified_base 4: mod_base = OTHER; note = cytidine-3'-phosphate
  modified_base 5: mod_base = OTHER; note = adenosine-3'-phosphate
  modified_base 6: mod_base = OTHER; note = cytidine-3'-phosphate
  modified_base 7: mod_base = OTHER; note = cytidine-3'-phosphate
  modified_base 8: mod_base = OTHER; note = guanosine-3'-phosphate
  modified_base 9: mod_base = OTHER; note = uridine-3'-phosphate
  modified_base 10: mod_base = OTHER; note = cytidine-3'-phosphate
  modified_base 11: mod_base = OTHER; note = adenosine-3'-phosphate
  modified_base 12: mod_base = OTHER; note = guanosine-3'-phosphate
  modified_base 13: mod_base = OTHER; note = adenosine-3'-phosphate
  modified_base 14: mod_base = OTHER; note = uridine-3'-phosphate
  modified_base 15: mod_base = OTHER; note = cytidine-3'-phosphate
  modified_base 16: mod_base = OTHER; note = cytidine-3'-phosphate
  modified_base 17: mod_base = OTHER; note = uridine-3'-phosphate
  modified_base 18: mod_base = OTHER; note = cytidine-3'-phosphate
  modified_base 19: mod_base = OTHER; note = guanosine-3'-phosphate
  misc_feature 1..19: note = RNA
  misc_feature 20..21: note = DNA
taccaccgtcagatcctcgtt

SEQ ID NO: 1616 - DNA, 21 bp, synthetic construct
  source 1..21: mol_type = other DNA
  modified_base 1: mod_base = OTHER; note = uridine-3'-phosphate
  modified_base 2: mod_base = OTHER; note = uridine-3'-phosphate
  modified_base 3: mod_base = OTHER; note = uridine-3'-phosphate
  modified_base 4: mod_base = OTHER; note = cytidine-3'-phosphate
  modified_base 5: mod_base = OTHER; note = cytidine-3'-phosphate
  modified_base 6: mod_base = OTHER; note = uridine-3'-phosphate
  modified_base 7: mod_base = OTHER; note = guanosine-3'-phosphate
  modified_base 8: mod_base = OTHER; note = guanosine-3'-phosphate
  modified_base 9: mod_base = OTHER; note = cytidine-3'-phosphate
  modified_base 10: mod_base = OTHER; note = cytidine-3'-phosphate
  modified_base 11: mod_base = OTHER; note = guanosine-3'-phosphate
  modified_base 12: mod_base = OTHER; note = adenosine-3'-phosphate
  modified_base 13: mod_base = OTHER; note = guanosine-3'-phosphate
  modified_base 14: mod_base = OTHER; note = cytidine-3'-phosphate
  modified_base 15: mod_base = OTHER; note = adenosine-3'-phosphate
  modified_base 16: mod_base = OTHER; note = cytidine-3'-phosphate
  modified_base 17: mod_base = OTHER; note = cytidine-3'-phosphate
  modified_base 18: mod_base = OTHER; note = adenosine-3'-phosphate
  modified_base 19: mod_base = OTHER; note = cytidine-3'-phosphate
  misc_feature 1..19: note = RNA
  misc_feature 20..21: note = DNA
tttcctggccgagcaccactt

SEQ ID NO: 1617 - DNA, 21 bp, synthetic construct
  source 1..21: mol_type = other DNA
  modified_base 1: mod_base = OTHER; note = uridine-3'-phosphate
  modified_base 2: mod_base = OTHER; note = guanosine-3'-phosphate
  modified_base 3: mod_base = OTHER; note = guanosine-3'-phosphate
  modified_base 4: mod_base = OTHER; note = uridine-3'-phosphate
  modified_base 5: mod_base = OTHER; note = uridine-3'-phosphate
  modified_base 6: mod_base = OTHER; note = adenosine-3'-phosphate
  modified_base 7: mod_base = OTHER; note = cytidine-3'-phosphate
  modified_base 8: mod_base = OTHER; note = guanosine-3'-phosphate
  modified_base 9: mod_base = OTHER; note = guanosine-3'-phosphate
  modified_base 10: mod_base = OTHER; note = cytidine-3'-phosphate
  modified_base 11: mod_base = OTHER; note = guanosine-3'-phosphate
  modified_base 12: mod_base = OTHER; note = uridine-3'-phosphate
  modified_base 13: mod_base = OTHER; note = uridine-3'-phosphate
  modified_base 14: mod_base = OTHER; note = cytidine-3'-phosphate
  modified_base 15: mod_base = OTHER; note = cytidine-3'-phosphate
  modified_base 16: mod_base = OTHER; note = uridine-3'-phosphate
  modified_base 17: mod_base = OTHER; note = guanosine-3'-phosphate
  modified_base 18: mod_base = OTHER; note = guanosine-3'-phosphate
  modified_base 19: mod_base = OTHER; note = cytidine-3'-phosphate
  misc_feature 1..19: note = RNA
  misc_feature 20..21: note = DNA
tggttacggcgttcctggctt

SEQ ID NO: 1618 - DNA, 21 bp, synthetic construct
  source 1..21: mol_type = other DNA
  modified_base 1: mod_base = OTHER; note = uridine-3'-phosphate
  modified_base 2: mod_base = OTHER; note = cytidine-3'-phosphate
  modified_base 3: mod_base = OTHER; note = uridine-3'-phosphate
  modified_base 4: mod_base = OTHER; note = cytidine-3'-phosphate
  modified_base 5: mod_base = OTHER; note = adenosine-3'-phosphate
  modified_base 6: mod_base = OTHER; note = cytidine-3'-phosphate
  modified_base 7: mod_base = OTHER; note = adenosine-3'-phosphate
  modified_base 8: mod_base = OTHER; note = guanosine-3'-phosphate
  modified_base 9: mod_base = OTHER; note = cytidine-3'-phosphate
  modified_base 10: mod_base = OTHER; note = uridine-3'-phosphate
  modified_base 11: mod_base = OTHER; note = guanosine-3'-phosphate
  modified_base 12: mod_base = OTHER; note = uridine-3'-phosphate
  modified_base 13: mod_base = OTHER; note = guanosine-3'-phosphate
  modified_base 14: mod_base = OTHER; note = guanosine-3'-phosphate
  modified_base 15: mod_base = OTHER; note = uridine-3'-phosphate
  modified_base 16: mod_base = OTHER; note = uridine-3'-phosphate
  modified_base 17: mod_base = OTHER; note = adenosine-3'-phosphate
  modified_base 18: mod_base = OTHER; note = cytidine-3'-phosphate
  modified_base 19: mod_base = OTHER; note = guanosine-3'-phosphate
  misc_feature 1..19: note = RNA
  misc_feature 20..21: note = DNA
tctcacagctgtggttacgtt

SEQ ID NO: 1619 - DNA, 21 bp, synthetic construct
  source 1..21: mol_type = other DNA
  modified_base 1: mod_base = OTHER; note = adenosine-3'-phosphate
  modified_base 2: mod_base = OTHER; note = cytidine-3'-phosphate
  modified_base 3: mod_base = OTHER; note = guanosine-3'-phosphate
  modified_base 4: mod_base = OTHER; note = uridine-3'-phosphate
  modified_base 5: mod_base = OTHER; note = cytidine-3'-phosphate
  modified_base 6: mod_base = OTHER; note = uridine-3'-phosphate
  modified_base 7: mod_base = OTHER; note = guanosine-3'-phosphate
  modified_base 8: mod_base = OTHER; note = guanosine-3'-phosphate
  modified_base 9: mod_base = OTHER; note = cytidine-3'-phosphate
  modified_base 10: mod_base = OTHER; note = adenosine-3'-phosphate
  modified_base 11: mod_base = OTHER; note = cytidine-3'-phosphate
  modified_base 12: mod_base = OTHER; note = guanosine-3'-phosphate
  modified_base 13: mod_base = OTHER; note = guanosine-3'-phosphate
  modified_base 14: mod_base = OTHER; note = cytidine-3'-phosphate
  modified_base 15: mod_base = OTHER; note = uridine-3'-phosphate
  modified_base 16: mod_base = OTHER; note = cytidine-3'-phosphate
  modified_base 17: mod_base = OTHER; note = adenosine-3'-phosphate
  modified_base 18: mod_base = OTHER; note = cytidine-3'-phosphate
  modified_base 19: mod_base = OTHER; note = adenosine-3'-phosphate
  misc_feature 1..19: note = RNA
  misc_feature 20..21: note = DNA
acgtctggcacggctcacatt

SEQ ID NO: 1620 - DNA, 21 bp, synthetic construct
  source 1..21: mol_type = other DNA
  modified_base 1: mod_base = OTHER; note = uridine-3'-phosphate
  modified_base 2: mod_base = OTHER; note = cytidine-3'-phosphate
  modified_base 3: mod_base = OTHER; note = adenosine-3'-phosphate
  modified_base 4: mod_base = OTHER; note = cytidine-3'-phosphate
  modified_base 5: mod_base = OTHER; note = guanosine-3'-phosphate
  modified_base 6: mod_base = OTHER; note = guanosine-3'-phosphate
  modified_base 7: mod_base = OTHER; note = cytidine-3'-phosphate
  modified_base 8: mod_base = OTHER; note = cytidine-3'-phosphate
  modified_base 9: mod_base = OTHER; note = adenosine-3'-phosphate
  modified_base 10: mod_base = OTHER; note = adenosine-3'-phosphate
  modified_base 11: mod_base = OTHER; note = cytidine-3'-phosphate
  modified_base 12: mod_base = OTHER; note = guanosine-3'-phosphate
  modified_base 13: mod_base = OTHER; note = uridine-3'-phosphate
  modified_base 14: mod_base = OTHER; note = cytidine-3'-phosphate
  modified_base 15: mod_base = OTHER; note = uridine-3'-phosphate
  modified_base 16: mod_base = OTHER; note = guanosine-3'-phosphate
  modified_base 17: mod_base = OTHER; note = guanosine-3'-phosphate
  modified_base 18: mod_base = OTHER; note = cytidine-3'-phosphate
  modified_base 19: mod_base = OTHER; note = adenosine-3'-phosphate
  misc_feature 1..19: note = RNA
  misc_feature 20..21: note = DNA
tcacggccaacgtctggcatt

SEQ ID NO: 1621 - DNA, 21 bp, synthetic construct
  source 1..21: mol_type = other DNA
  modified_base 1: mod_base = OTHER; note = adenosine-3'-phosphate
  modified_base 2: mod_base = OTHER; note = guanosine-3'-phosphate
  modified_base 3: mod_base = OTHER; note = cytidine-3'-phosphate
  modified_base 4: mod_base = OTHER; note = guanosine-3'-phosphate
  modified_base 5: mod_base = OTHER; note = guanosine-3'-phosphate
  modified_base 6: mod_base = OTHER; note = uridine-3'-phosphate
  modified_base 7: mod_base = OTHER; note = adenosine-3'-phosphate
  modified_base 8: mod_base = OTHER; note = guanosine-3'-phosphate
  modified_base 9: mod_base = OTHER; note = guanosine-3'-phosphate
  modified_base 10: mod_base = OTHER; note = adenosine-3'-phosphate
  modified_base 11: mod_base = OTHER; note = guanosine-3'-phosphate
  modified_base 12: mod_base = OTHER; note = cytidine-3'-phosphate
  modified_base 13: mod_base = OTHER; note = guanosine-3'-phosphate
  modified_base 14: mod_base = OTHER; note = cytidine-3'-phosphate
  modified_base 15: mod_base = OTHER; note = adenosine-3'-phosphate
  modified_base 16: mod_base = OTHER; note = cytidine-3'-phosphate
  modified_base 17: mod_base = OTHER; note = guanosine-3'-phosphate
  modified_base 18: mod_base = OTHER; note = guanosine-3'-phosphate
  modified_base 19: mod_base = OTHER; note = cytidine-3'-phosphate
  misc_feature 1..19: note = RNA
  misc_feature 20..21: note = DNA
agcggtaggagcgcacggctt

SEQ ID NO: 1622 - DNA, 21 bp, synthetic construct
  source 1..21: mol_type = other DNA
  modified_base 1: mod_base = OTHER; note = adenosine-3'-phosphate
  modified_base 2: mod_base = OTHER; note = guanosine-3'-phosphate
  modified_base 3: mod_base = OTHER; note = guanosine-3'-phosphate
  modified_base 4: mod_base = OTHER; note = cytidine-3'-phosphate
  modified_base 5: mod_base = OTHER; note = cytidine-3'-phosphate
  modified_base 6: mod_base = OTHER; note = uridine-3'-phosphate
  modified_base 7: mod_base = OTHER; note = cytidine-3'-phosphate
  modified_base 8: mod_base = OTHER; note = guanosine-3'-phosphate
  modified_base 9: mod_base = OTHER; note = uridine-3'-phosphate
  modified_base 10: mod_base = OTHER; note = guanosine-3'-phosphate
  modified_base 11: mod_base = OTHER; note = cytidine-3'-phosphate
  modified_base 12: mod_base = OTHER; note = adenosine-3'-phosphate
  modified_base 13: mod_base = OTHER; note = adenosine-3'-phosphate
  modified_base 14: mod_base = OTHER; note = guanosine-3'-phosphate
  modified_base 15: mod_base = OTHER; note = cytidine-3'-phosphate
  modified_base 16: mod_base = OTHER; note = guanosine-3'-phosphate
  modified_base 17: mod_base = OTHER; note = guanosine-3'-phosphate
  modified_base 18: mod_base = OTHER; note = uridine-3'-phosphate
  modified_base 19: mod_base = OTHER; note = adenosine-3'-phosphate
  misc_feature 1..19: note = RNA
  misc_feature 20..21: note = DNA
aggcctcgtgcaagcggtatt

SEQ ID NO: 1623 - DNA, 21 bp, synthetic construct
  source 1..21: mol_type = other DNA
  modified_base 1: mod_base = OTHER; note = adenosine-3'-phosphate
  modified_base 2: mod_base = OTHER; note = cytidine-3'-phosphate
  modified_base 3: mod_base = OTHER; note = guanosine-3'-phosphate
  modified_base 4: mod_base = OTHER; note = guanosine-3'-phosphate
  modified_base 5: mod_base = OTHER; note = guanosine-3'-phosphate
  modified_base 6: mod_base = OTHER; note = cytidine-3'-phosphate
  modified_base 7: mod_base = OTHER; note = guanosine-3'-phosphate
  modified_base 8: mod_base = OTHER; note = adenosine-3'-phosphate
  modified_base 9: mod_base = OTHER; note = guanosine-3'-phosphate
  modified_base 10: mod_base = OTHER; note = adenosine-3'-phosphate
  modified_base 11: mod_base = OTHER; note = adenosine-3'-phosphate
  modified_base 12: mod_base = OTHER; note = guanosine-3'-phosphate
  modified_base 13: mod_base = OTHER; note = guanosine-3'-phosphate
  modified_base 14: mod_base = OTHER; note = cytidine-3'-phosphate
  modified_base 15: mod_base = OTHER; note = cytidine-3'-phosphate
  modified_base 16: mod_base = OTHER; note = uridine-3'-phosphate
  modified_base 17: mod_base = OTHER; note = cytidine-3'-phosphate
  modified_base 18: mod_base = OTHER; note = guanosine-3'-phosphate
  modified_base 19: mod_base = OTHER; note = uridine-3'-phosphate
  misc_feature 1..19: note = RNA
  misc_feature 20..21: note = DNA
acgggcgagaaggcctcgttt

SEQ ID NO: 1624 - DNA, 21 bp, synthetic construct
  source 1..21: mol_type = other DNA
  modified_base 1: mod_base = OTHER; note = uridine-3'-phosphate
  modified_base 2: mod_base = OTHER; note = cytidine-3'-phosphate
  modified_base 3: mod_base = OTHER; note = uridine-3'-phosphate
  modified_base 4: mod_base = OTHER; note = guanosine-3'-phosphate
  modified_base 5: mod_base = OTHER; note = guanosine-3'-phosphate
  modified_base 6: mod_base = OTHER; note = uridine-3'-phosphate
  modified_base 7: mod_base = OTHER; note = adenosine-3'-phosphate
  modified_base 8: mod_base = OTHER; note = guanosine-3'-phosphate
  modified_base 9: mod_base = OTHER; note = cytidine-3'-phosphate
  modified_base 10: mod_base = OTHER; note = uridine-3'-phosphate
  modified_base 11: mod_base = OTHER; note = guanosine-3'-phosphate
  modified_base 12: mod_base = OTHER; note = adenosine-3'-phosphate
  modified_base 13: mod_base = OTHER; note = cytidine-3'-phosphate
  modified_base 14: mod_base = OTHER; note = guanosine-3'-phosphate
  modified_base 15: mod_base = OTHER; note = guanosine-3'-phosphate
  modified_base 16: mod_base = OTHER; note = guanosine-3'-phosphate
  modified_base 17: mod_base = OTHER; note = cytidine-3'-phosphate
  modified_base 18: mod_base = OTHER; note = guanosine-3'-phosphate
  modified_base 19: mod_base = OTHER; note = adenosine-3'-phosphate
  misc_feature 1..19: note = RNA
  misc_feature 20..21: note = DNA
tctggtagctgacgggcgatt

SEQ ID NO: 1625 - DNA, 21 bp, synthetic construct
  source 1..21: mol_type = other DNA
  modified_base 1: mod_base = OTHER; note = adenosine-3'-phosphate
  modified_base 2: mod_base = OTHER; note = guanosine-3'-phosphate
  modified_base 3: mod_base = OTHER; note = cytidine-3'-phosphate
  modified_base 4: mod_base = OTHER; note = cytidine-3'-phosphate
  modified_base 5: mod_base = OTHER; note = adenosine-3'-phosphate
  modified_base 6: mod_base = OTHER; note = guanosine-3'-phosphate
  modified_base 7: mod_base = OTHER; note = guanosine-3'-phosphate
  modified_base 8: mod_base = OTHER; note = uridine-3'-phosphate
  modified_base 9: mod_base = OTHER; note = cytidine-3'-phosphate
  modified_base 10: mod_base = OTHER; note = guanosine-3'-phosphate
  modified_base 11: mod_base = OTHER; note = uridine-3'-phosphate
  modified_base 12: mod_base = OTHER; note = guanosine-3'-phosphate
  modified_base 13: mod_base = OTHER; note = cytidine-3'-phosphate
  modified_base 14: mod_base = OTHER; note = uridine-3'-phosphate
  modified_base 15: mod_base = OTHER; note = guanosine-3'-phosphate
  modified_base 16: mod_base = OTHER; note = guanosine-3'-phosphate
  modified_base 17: mod_base = OTHER; note = uridine-3'-phosphate
  modified_base 18: mod_base = OTHER; note = adenosine-3'-phosphate
  modified_base 19: mod_base = OTHER; note = guanosine-3'-phosphate
  misc_feature 1..19: note = RNA
  misc_feature 20..21: note = DNA
agccaggtcgtgctggtagtt

SEQ ID NO: 1626 - DNA, 21 bp, synthetic construct
  source 1..21: mol_type = other DNA
  modified_base 1: mod_base = OTHER; note = adenosine-3'-phosphate
  modified_base 2: mod_base = OTHER; note = guanosine-3'-phosphate
  modified_base 3: mod_base = OTHER; note = guanosine-3'-phosphate
  modified_base 4: mod_base = OTHER; note = cytidine-3'-phosphate
  modified_base 5: mod_base = OTHER; note = guanosine-3'-phosphate
  modified_base 6: mod_base = OTHER; note = cytidine-3'-phosphate
  modified_base 7: mod_base = OTHER; note = adenosine-3'-phosphate
  modified_base 8: mod_base = OTHER; note = adenosine-3'-phosphate
  modified_base 9: mod_base = OTHER; note = cytidine-3'-phosphate
  modified_base 10: mod_base = OTHER; note = adenosine-3'-phosphate
  modified_base 11: mod_base = OTHER; note = guanosine-3'-phosphate
  modified_base 12: mod_base = OTHER; note = adenosine-3'-phosphate
  modified_base 13: mod_base = OTHER; note = guanosine-3'-phosphate
  modified_base 14: mod_base = OTHER; note = cytidine-3'-phosphate
  modified_base 15: mod_base = OTHER; note = cytidine-3'-phosphate
  modified_base 16: mod_base = OTHER; note = adenosine-3'-phosphate
  modified_base 17: mod_base = OTHER; note = guanosine-3'-phosphate
  modified_base 18: mod_base = OTHER; note = guanosine-3'-phosphate
  modified_base 19: mod_base = OTHER; note = uridine-3'-phosphate
  misc_feature 1..19: note = RNA
  misc_feature 20..21: note = DNA
aggcgcaacagagccaggttt

SEQ ID NO: 1627 - DNA, 21 bp, synthetic construct
  source 1..21: mol_type = other DNA
  modified_base 1: mod_base = OTHER; note = uridine-3'-phosphate
  modified_base 2: mod_base = OTHER; note = adenosine-3'-phosphate
  modified_base 3: mod_base = OTHER; note = uridine-3'-phosphate
  modified_base 4: mod_base = OTHER; note = cytidine-3'-phosphate
  modified_base 5: mod_base = OTHER; note = cytidine-3'-phosphate
  modified_base 6: mod_base = OTHER; note = uridine-3'-phosphate
  modified_base 7: mod_base = OTHER; note = cytidine-3'-phosphate
  modified_base 8: mod_base = OTHER; note = cytidine-3'-phosphate
  modified_base 9: mod_base = OTHER; note = uridine-3'-phosphate
  modified_base 10: mod_base = OTHER; note = guanosine-3'-phosphate
  modified_base 11: mod_base = OTHER; note = adenosine-3'-phosphate
  modified_base 12: mod_base = OTHER; note = adenosine-3'-phosphate
  modified_base 13: mod_base = OTHER; note = guanosine-3'-phosphate
  modified_base 14: mod_base = OTHER; note = guanosine-3'-phosphate
  modified_base 15: mod_base = OTHER; note = cytidine-3'-phosphate
  modified_base 16: mod_base = OTHER; note = guanosine-3'-phosphate
  modified_base 17: mod_base = OTHER; note = cytidine-3'-phosphate
  modified_base 18: mod_base = OTHER; note = adenosine-3'-phosphate
  modified_base 19: mod_base = OTHER; note = adenosine-3'-phosphate
  misc_feature 1..19: note = RNA
  misc_feature 20..21: note = DNA
tatcctcctgaaggcgcaatt

SEQ ID NO: 1628 - DNA, 21 bp, synthetic construct
  source 1..21: mol_type = other DNA
  modified_base 1: mod_base = OTHER; note = adenosine-3'-phosphate
  modified_base 2: mod_base = OTHER; note = guanosine-3'-phosphate
  modified_base 3: mod_base = OTHER; note = cytidine-3'-phosphate
  modified_base 4: mod_base = OTHER; note = uridine-3'-phosphate
  modified_base 5: mod_base = OTHER; note = guanosine-3'-phosphate
  modified_base 6: mod_base = OTHER; note = cytidine-3'-phosphate
  modified_base 7: mod_base = OTHER; note = cytidine-3'-phosphate
  modified_base 8: mod_base = OTHER; note = guanosine-3'-phosphate
  modified_base 9: mod_base = OTHER; note = uridine-3'-phosphate
  modified_base 10: mod_base = OTHER; note = cytidine-3'-phosphate
  modified_base 11: mod_base = OTHER; note = cytidine-3'-phosphate
  modified_base 12: mod_base = OTHER; note = guanosine-3'-phosphate
  modified_base 13: mod_base = OTHER; note = cytidine-3'-phosphate
  modified_base 14: mod_base = OTHER; note = adenosine-3'-phosphate
  modified_base 15: mod_base = OTHER; note = uridine-3'-phosphate
  modified_base 16: mod_base = OTHER; note = cytidine-3'-phosphate
  modified_base 17: mod_base = OTHER; note = cytidine-3'-phosphate
  modified_base 18: mod_base = OTHER; note = uridine-3'-phosphate
  modified_base 19: mod_base = OTHER; note = cytidine-3'-phosphate
  misc_feature 1..19: note = RNA
  misc_feature 20..21: note = DNA
agctgccgtccgcatcctctt

SEQ ID NO: 1629 - DNA, 21 bp, synthetic construct
  source 1..21: mol_type = other DNA
  modified_base 1: mod_base = OTHER; note = adenosine-3'-phosphate
  modified_base 2: mod_base = OTHER; note = guanosine-3'-phosphate
  modified_base 3: mod_base = OTHER; note = guanosine-3'-phosphate
  modified_base 4: mod_base = OTHER; note = adenosine-3'-phosphate
  modified_base 5: mod_base = OTHER; note = guanosine-3'-phosphate
  modified_base 6: mod_base = OTHER; note = cytidine-3'-phosphate
  modified_base 7: mod_base = OTHER; note = guanosine-3'-phosphate
  modified_base 8: mod_base = OTHER; note = cytidine-3'-phosphate
  modified_base 9: mod_base = OTHER; note = guanosine-3'-phosphate
  modified_base 10: mod_base = OTHER; note = cytidine-3'-phosphate
  modified_base 11: mod_base = OTHER; note = adenosine-3'-phosphate
  modified_base 12: mod_base = OTHER; note = guanosine-3'-phosphate
  modified_base 13: mod_base = OTHER; note = cytidine-3'-phosphate
  modified_base 14: mod_base = OTHER; note = uridine-3'-phosphate
  modified_base 15: mod_base = OTHER; note = guanosine-3'-phosphate
  modified_base 16: mod_base = OTHER; note = cytidine-3'-phosphate
  modified_base 17: mod_base = OTHER; note = cytidine-3'-phosphate
  modified_base 18: mod_base = OTHER; note = guanosine-3'-phosphate
  modified_base 19: mod_base = OTHER; note = uridine-3'-phosphate
  misc_feature 1..19: note = RNA
  misc_feature 20..21: note = DNA
aggagcgcgcagctgccgttt

SEQ ID NO: 1630 - DNA, 21 bp, synthetic construct
  source 1..21: mol_type = other DNA
  modified_base 1: mod_base = OTHER; note = adenosine-3'-phosphate
  modified_base 2: mod_base = OTHER; note = cytidine-3'-phosphate
  modified_base 3: mod_base = OTHER; note = guanosine-3'-phosphate
  modified_base 4: mod_base = OTHER; note = uridine-3'-phosphate
  modified_base 5: mod_base = OTHER; note = adenosine-3'-phosphate
  modified_base 6: mod_base = OTHER; note = adenosine-3'-phosphate
  modified_base 7: mod_base = OTHER; note = guanosine-3'-phosphate
  modified_base 8: mod_base = OTHER; note = guanosine-3'-phosphate
  modified_base 9: mod_base = OTHER; note = cytidine-3'-phosphate
  modified_base 10: mod_base = OTHER; note = guanosine-3'-phosphate
  modified_base 11: mod_base = OTHER; note = adenosine-3'-phosphate
  modified_base 12: mod_base = OTHER; note = cytidine-3'-phosphate
  modified_base 13: mod_base = OTHER; note = adenosine-3'-phosphate
  modified_base 14: mod_base = OTHER; note = guanosine-3'-phosphate
  modified_base 15: mod_base = OTHER; note = guanosine-3'-phosphate
  modified_base 16: mod_base = OTHER; note = adenosine-3'-phosphate
  modified_base 17: mod_base = OTHER; note = guanosine-3'-phosphate
  modified_base 18: mod_base = OTHER; note = cytidine-3'-phosphate
  modified_base 19: mod_base = OTHER; note = guanosine-3'-phosphate
  misc_feature 1..19: note = RNA
  misc_feature 20..21: note = DNA
acgtaaggcgacaggagcgtt

SEQ ID NO: 1631 - DNA, 21 bp, synthetic construct
  source 1..21: mol_type = other DNA
  modified_base 1: mod_base = OTHER; note = adenosine-3'-phosphate
  modified_base 2: mod_base = OTHER; note = cytidine-3'-phosphate
  modified_base 3: mod_base = OTHER; note = adenosine-3'-phosphate
  modified_base 4: mod_base = OTHER; note = cytidine-3'-phosphate
  modified_base 5: mod_base = OTHER; note = cytidine-3'-phosphate
  modified_base 6: mod_base = OTHER; note = guanosine-3'-phosphate
  modified_base 7: mod_base = OTHER; note = guanosine-3'-phosphate
  modified_base 8: mod_base = OTHER; note = cytidine-3'-phosphate
  modified_base 9: mod_base = OTHER; note = uridine-3'-phosphate
  modified_base 10: mod_base = OTHER; note = guanosine-3'-phosphate
  modified_base 11: mod_base = OTHER; note = adenosine-3'-phosphate
  modified_base 12: mod_base = OTHER; note = adenosine-3'-phosphate
  modified_base 13: mod_base = OTHER; note = cytidine-3'-phosphate
  modified_base 14: mod_base = OTHER; note = guanosine-3'-phosphate
  modified_base 15: mod_base = OTHER; note = uridine-3'-phosphate
  modified_base 16: mod_base = OTHER; note = adenosine-3'-phosphate
  modified_base 17: mod_base = OTHER; note = adenosine-3'-phosphate
  modified_base 18: mod_base = OTHER; note = guanosine-3'-phosphate
  modified_base 19: mod_base = OTHER; note = guanosine-3'-phosphate
  misc_feature 1..19: note = RNA
  misc_feature 20..21: note = DNA
acaccggctgaacgtaaggtt

SEQ ID NO: 1632 - DNA, 21 bp, synthetic construct
  source 1..21: mol_type = other DNA
  modified_base 1: mod_base = OTHER; note = uridine-3'-phosphate
  modified_base 2: mod_base = OTHER; note = uridine-3'-phosphate
  modified_base 3: mod_base = OTHER; note = uridine-3'-phosphate
  modified_base 4: mod_base = OTHER; note = guanosine-3'-phosphate
  modified_base 5: mod_base = OTHER; note = guanosine-3'-phosphate
  modified_base 6: mod_base = OTHER; note = cytidine-3'-phosphate
  modified_base 7: mod_base = OTHER; note = adenosine-3'-phosphate
  modified_base 8: mod_base = OTHER; note = guanosine-3'-phosphate
  modified_base 9: mod_base = OTHER; note = guanosine-3'-phosphate
  modified_base 10: mod_base = OTHER; note = cytidine-3'-phosphate
  modified_base 11: mod_base = OTHER; note = adenosine-3'-phosphate
  modified_base 12: mod_base = OTHER; note = cytidine-3'-phosphate
  modified_base 13: mod_base = OTHER; note = adenosine-3'-phosphate
  modified_base 14: mod_base = OTHER; note = cytidine-3'-phosphate
  modified_base 15: mod_base = OTHER; note = cytidine-3'-phosphate
  modified_base 16: mod_base = OTHER; note = guanosine-3'-phosphate
  modified_base 17: mod_base = OTHER; note = guanosine-3'-phosphate
  modified_base 18: mod_base = OTHER; note = cytidine-3'-phosphate
  modified_base 19: mod_base = OTHER; note = uridine-3'-phosphate
  misc_feature 1..19: note = RNA
  misc_feature 20..21: note = DNA
tttggcaggcacaccggcttt

SEQ ID NO: 1633 - DNA, 21 bp, synthetic construct
  source 1..21: mol_type = other DNA
  modified_base 1: mod_base = OTHER; note = uridine-3'-phosphate
  modified_base 2: mod_base = OTHER; note = guanosine-3'-phosphate
  modified_base 3: mod_base = OTHER; note = cytidine-3'-phosphate
  modified_base 4: mod_base = OTHER; note = guanosine-3'-phosphate
  modified_base 5: mod_base = OTHER; note = cytidine-3'-phosphate
  modified_base 6: mod_base = OTHER; note = guanosine-3'-phosphate
  modified_base 7: mod_base = OTHER; note = guanosine-3'-phosphate
  modified_base 8: mod_base = OTHER; note = cytidine-3'-phosphate
  modified_base 9: mod_base = OTHER; note = guanosine-3'-phosphate
  modified_base 10: mod_base = OTHER; note = cytidine-3'-phosphate
  modified_base 11: mod_base = OTHER; note = cytidine-3'-phosphate
  modified_base 12: mod_base = OTHER; note = guanosine-3'-phosphate
  modified_base 13: mod_base = OTHER; note = cytidine-3'-phosphate
  modified_base 14: mod_base = OTHER; note = uridine-3'-phosphate
  modified_base 15: mod_base = OTHER; note = uridine-3'-phosphate
  modified_base 16: mod_base = OTHER; note = guanosine-3'-phosphate
  modified_base 17: mod_base = OTHER; note = guanosine-3'-phosphate
  modified_base 18: mod_base = OTHER; note = cytidine-3'-phosphate
  modified_base 19: mod_base = OTHER; note = adenosine-3'-phosphate
  misc_feature 1..19: note = RNA
  misc_feature 20..21: note = DNA
tgcgcggcgccgcttggcatt

SEQ ID NO: 1634 - DNA, 21 bp, synthetic construct
  source 1..21: mol_type = other DNA
  modified_base 1: mod_base = OTHER; note = uridine-3'-phosphate
  modified_base 2: mod_base = OTHER; note = cytidine-3'-phosphate
  modified_base 3: mod_base = OTHER; note = guanosine-3'-phosphate
  modified_base 4: mod_base = OTHER; note = guanosine-3'-phosphate
  modified_base 5: mod_base = OTHER; note = adenosine-3'-phosphate
  modified_base 6: mod_base = OTHER; note = guanosine-3'-phosphate
  modified_base 7: mod_base = OTHER; note = guanosine-3'-phosphate
  modified_base 8: mod_base = OTHER; note = guanosine-3'-phosphate
  modified_base 9: mod_base = OTHER; note = uridine-3'-phosphate
  modified_base 10: mod_base = OTHER; note = cytidine-3'-phosphate
  modified_base 11: mod_base = OTHER; note = guanosine-3'-phosphate
  modified_base 12: mod_base = OTHER; note = cytidine-3'-phosphate
  modified_base 13: mod_base = OTHER; note = guanosine-3'-phosphate
  modified_base 14: mod_base = OTHER; note = cytidine-3'-phosphate
  modified_base 15: mod_base = OTHER; note = guanosine-3'-phosphate
  modified_base 16: mod_base = OTHER; note = guanosine-3'-phosphate
  modified_base 17: mod_base = OTHER; note = cytidine-3'-phosphate
  modified_base 18: mod_base = OTHER; note = guanosine-3'-phosphate
  modified_base 19: mod_base = OTHER; note = cytidine-3'-phosphate
  misc_feature 1..19: note = RNA
  misc_feature 20..21: note = DNA
tcggagggtcgcgcggcgctt

SEQ ID NO: 1635 - DNA, 21 bp, synthetic construct
  source 1..21: mol_type = other DNA
  modified_base 1: mod_base = OTHER; note = adenosine-3'-phosphate
  modified_base 2: mod_base = OTHER; note = guanosine-3'-phosphate
  modified_base 3: mod_base = OTHER; note = adenosine-3'-phosphate
  modified_base 4: mod_base = OTHER; note = guanosine-3'-phosphate
  modified_base 5: mod_base = OTHER; note = cytidine-3'-phosphate
  modified_base 6: mod_base = OTHER; note = guanosine-3'-phosphate
  modified_base 7: mod_base = OTHER; note = uridine-3'-phosphate
  modified_base 8: mod_base = OTHER; note = guanosine-3'-phosphate
  modified_base 9: mod_base = OTHER; note = guanosine-3'-phosphate
  modified_base 10: mod_base = OTHER; note = uridine-3'-phosphate
  modified_base 11: mod_base = OTHER; note = cytidine-3'-phosphate
  modified_base 12: mod_base = OTHER; note = uridine-3'-phosphate
  modified_base 13: mod_base = OTHER; note = cytidine-3'-phosphate
  modified_base 14: mod_base = OTHER; note = guanosine-3'-phosphate
  modified_base 15: mod_base = OTHER; note = guanosine-3'-phosphate
  modified_base 16: mod_base = OTHER; note = adenosine-3'-phosphate
  modified_base 17: mod_base = OTHER; note = guanosine-3'-phosphate
  modified_base 18: mod_base = OTHER; note = guanosine-3'-phosphate
  modified_base 19: mod_base = OTHER; note = guanosine-3'-phosphate
  misc_feature 1..19: note = RNA
  misc_feature 20..21: note = DNA
agagcgtggtctcggagggtt

SEQ ID NO: 1636 - DNA, 21 bp, synthetic construct
  source 1..21: mol_type = other DNA
  modified_base 1: mod_base = OTHER; note = uridine-3'-phosphate
  modified_base 2: mod_base = OTHER; note = cytidine-3'-phosphate
  modified_base 3: mod_base = OTHER; note = guanosine-3'-phosphate
  modified_base 4: mod_base = OTHER; note = guanosine-3'-phosphate
  modified_base 5: mod_base = OTHER; note = cytidine-3'-phosphate
  modified_base 6: mod_base = OTHER; note = cytidine-3'-phosphate
  modified_base 7: mod_base = OTHER; note = adenosine-3'-phosphate
  modified_base 8: mod_base = OTHER; note = cytidine-3'-phosphate
  modified_base 9: mod_base = OTHER; note = cytidine-3'-phosphate
  modified_base 10: mod_base = OTHER; note = uridine-3'-phosphate
  modified_base 11: mod_base = OTHER; note = guanosine-3'-phosphate
  modified_base 12: mod_base = OTHER; note = guanosine-3'-phosphate
  modified_base 13: mod_base = OTHER; note = cytidine-3'-phosphate
  modified_base 14: mod_base = OTHER; note = adenosine-3'-phosphate
  modified_base 15: mod_base = OTHER; note = guanosine-3'-phosphate
  modified_base 16: mod_base = OTHER; note = adenosine-3'-phosphate
  modified_base 17: mod_base = OTHER; note = guanosine-3'-phosphate
  modified_base 18: mod_base = OTHER; note = cytidine-3'-phosphate
  modified_base 19: mod_base = OTHER; note = guanosine-3'-phosphate
  misc_feature 1..19: note = RNA
  misc_feature 20..21: note = DNA
tcggccacctggcagagcgtt

SEQ ID NO: 1637 - DNA, 21 bp, synthetic construct
  source 1..21: mol_type = other DNA
  modified_base 1: mod_base = OTHER; note = uridine-3'-phosphate
  modified_base 2: mod_base = OTHER; note = guanosine-3'-phosphate
  modified_base 3: mod_base = OTHER; note = guanosine-3'-phosphate
  modified_base 4: mod_base = OTHER; note = cytidine-3'-phosphate
  modified_base 5: mod_base = OTHER; note = cytidine-3'-phosphate
  modified_base 6: mod_base = OTHER; note = cytidine-3'-phosphate
  modified_base 7: mod_base = OTHER; note = cytidine-3'-phosphate
  modified_base 8: mod_base = OTHER; note = adenosine-3'-phosphate
  modified_base 9: mod_base = OTHER; note = guanosine-3'-phosphate
  modified_base 10: mod_base = OTHER; note = cytidine-3'-phosphate
  modified_base 11: mod_base = OTHER; note = cytidine-3'-phosphate
  modified_base 12: mod_base = OTHER; note = guanosine-3'-phosphate
  modified_base 13: mod_base = OTHER; note = guanosine-3'-phosphate
  modified_base 14: mod_base = OTHER; note = cytidine-3'-phosphate
  modified_base 15: mod_base = OTHER; note = cytidine-3'-phosphate
  modified_base 16: mod_base = OTHER; note = adenosine-3'-phosphate
  modified_base 17: mod_base = OTHER; note = cytidine-3'-phosphate
  modified_base 18: mod_base = OTHER; note = cytidine-3'-phosphate
  modified_base 19: mod_base = OTHER; note = uridine-3'-phosphate
  misc_feature 1..19: note = RNA
  misc_feature 20..21: note = DNA
tggccccagccggccaccttt

SEQ ID NO: 1638 - DNA, 21 bp, synthetic construct
  source 1..21: mol_type = other DNA
  modified_base 1: mod_base = OTHER; note = uridine-3'-phosphate
  modified_base 2: mod_base = OTHER; note = cytidine-3'-phosphate
  modified_base 3: mod_base = OTHER; note = uridine-3'-phosphate
  modified_base 4: mod_base = OTHER; note = cytidine-3'-phosphate
  modified_base 5: mod_base = OTHER; note = guanosine-3'-phosphate
  modified_base 6: mod_base = OTHER; note = adenosine-3'-phosphate
  modified_base 7: mod_base = OTHER; note = adenosine-3'-phosphate
  modified_base 8: mod_base = OTHER; note = cytidine-3'-phosphate
  modified_base 9: mod_base = OTHER; note = uridine-3'-phosphate
  modified_base 10: mod_base = OTHER; note = guanosine-3'-phosphate
  modified_base 11: mod_base = OTHER; note = guanosine-3'-phosphate
  modified_base 12: mod_base = OTHER; note = uridine-3'-phosphate
  modified_base 13: mod_base = OTHER; note = guanosine-3'-phosphate
  modified_base 14: mod_base = OTHER; note = guanosine-3'-phosphate
  modified_base 15: mod_base = OTHER; note = cytidine-3'-phosphate
  modified_base 16: mod_base = OTHER; note = cytidine-3'-phosphate
  modified_base 17: mod_base = OTHER; note = cytidine-3'-phosphate
  modified_base 18: mod_base = OTHER; note = cytidine-3'-phosphate
  modified_base 19: mod_base = OTHER; note = adenosine-3'-phosphate
  misc_feature 1..19: note = RNA
  misc_feature 20..21: note = DNA
tctcgaactggtggccccatt

SEQ ID NO: 1639 - DNA, 21 bp, synthetic construct
  source 1..21: mol_type = other DNA
  modified_base 1: mod_base = OTHER; note = adenosine-3'-phosphate
  modified_base 2: mod_base = OTHER; note = uridine-3'-phosphate
  modified_base 3: mod_base = OTHER; note = uridine-3'-phosphate
  modified_base 4: mod_base = OTHER; note = cytidine-3'-phosphate
  modified_base 5: mod_base = OTHER; note = cytidine-3'-phosphate
  modified_base 6: mod_base = OTHER; note = uridine-3'-phosphate
  modified_base 7: mod_base = OTHER; note = cytidine-3'-phosphate
  modified_base 8: mod_base = OTHER; note = cytidine-3'-phosphate
  modified_base 9: mod_base = OTHER; note = guanosine-3'-phosphate
  modified_base 10: mod_base = OTHER; note = cytidine-3'-phosphate
  modified_base 11: mod_base = OTHER; note = cytidine-3'-phosphate
  modified_base 12: mod_base = OTHER; note = cytidine-3'-phosphate
  modified_base 13: mod_base = OTHER; note = cytidine-3'-phosphate
  modified_base 14: mod_base = OTHER; note = cytidine-3'-phosphate
  modified_base 15: mod_base = OTHER; note = uridine-3'-phosphate
  modified_base 16: mod_base = OTHER; note = cytidine-3'-phosphate
  modified_base 17: mod_base = OTHER; note = guanosine-3'-phosphate
  modified_base 18: mod_base = OTHER; note = adenosine-3'-phosphate
  modified_base 19: mod_base = OTHER; note = adenosine-3'-phosphate
  misc_feature 1..19: note = RNA
  misc_feature 20..21: note = DNA
attcctccgccccctcgaatt

SEQ ID NO: 1640 - DNA, 21 bp, synthetic construct
  source 1..21: mol_type = other DNA
  modified_base 1: mod_base = OTHER; note = adenosine-3'-phosphate
  modified_base 2: mod_base = OTHER; note = adenosine-3'-phosphate
  modified_base 3: mod_base = OTHER; note = guanosine-3'-phosphate
  modified_base 4: mod_base = OTHER; note = cytidine-3'-phosphate
  modified_base 5: mod_base = OTHER; note = uridine-3'-phosphate
  modified_base 6: mod_base = OTHER; note = guanosine-3'-phosphate
  modified_base 7: mod_base = OTHER; note = guanosine-3'-phosphate
  modified_base 8: mod_base = OTHER; note = cytidine-3'-phosphate
  modified_base 9: mod_base = OTHER; note = adenosine-3'-phosphate
  modified_base 10: mod_base = OTHER; note = uridine-3'-phosphate
  modified_base 11: mod_base = OTHER; note = adenosine-3'-phosphate
  modified_base 12: mod_base = OTHER; note = uridine-3'-phosphate
  modified_base 13: mod_base = OTHER; note = uridine-3'-phosphate
  modified_base 14: mod_base = OTHER; note = cytidine-3'-phosphate
  modified_base 15: mod_base = OTHER; note = cytidine-3'-phosphate
  modified_base 16: mod_base = OTHER; note = uridine-3'-phosphate
  modified_base 17: mod_base = OTHER; note = cytidine-3'-phosphate
  modified_base 18: mod_base = OTHER; note = cytidine-3'-phosphate
  modified_base 19: mod_base = OTHER; note = guanosine-3'-phosphate
  misc_feature 1..19: note = RNA
  misc_feature 20..21: note = DNA
aagctggcatattcctccgtt

SEQ ID NO: 1641 - DNA, 21 bp, synthetic construct
  source 1..21: mol_type = other DNA
  modified_base 1: mod_base = OTHER; note = uridine-3'-phosphate
  modified_base 2: mod_base = OTHER; note = guanosine-3'-phosphate
  modified_base 3: mod_base = OTHER; note = cytidine-3'-phosphate
  modified_base 4: mod_base = OTHER; note = cytidine-3'-phosphate
  modified_base 5: mod_base = OTHER; note = uridine-3'-phosphate
  modified_base 6: mod_base = OTHER; note = cytidine-3'-phosphate
  modified_base 7: mod_base = OTHER; note = cytidine-3'-phosphate
  modified_base 8: mod_base = OTHER; note = uridine-3'-phosphate
  modified_base 9: mod_base = OTHER; note = guanosine-3'-phosphate
  modified_base 10: mod_base = OTHER; note = cytidine-3'-phosphate
  modified_base 11: mod_base = OTHER; note = adenosine-3'-phosphate
  modified_base 12: mod_base = OTHER; note = guanosine-3'-phosphate
  modified_base 13: mod_base = OTHER; note = guanosine-3'-phosphate
  modified_base 14: mod_base = OTHER; note = adenosine-3'-phosphate
  modified_base 15: mod_base = OTHER; note = adenosine-3'-phosphate
  modified_base 16: mod_base = OTHER; note = guanosine-3'-phosphate
  modified_base 17: mod_base = OTHER; note = cytidine-3'-phosphate
  modified_base 18: mod_base = OTHER; note = uridine-3'-phosphate
  modified_base 19: mod_base = OTHER; note = guanosine-3'-phosphate
  misc_feature 1..19: note = RNA
  misc_feature 20..21: note = DNA
tgcctcctgcaggaagctgtt

SEQ ID NO: 1642 - DNA, 21 bp, synthetic construct
  source 1..21: mol_type = other DNA
  modified_base 1: mod_base = OTHER; note = adenosine-3'-phosphate
  modified_base 2: mod_base = OTHER; note = adenosine-3'-phosphate
  modified_base 3: mod_base = OTHER; note = cytidine-3'-phosphate
  modified_base 4: mod_base = OTHER; note = guanosine-3'-phosphate
  modified_base 5: mod_base = OTHER; note = guanosine-3'-phosphate
  modified_base 6: mod_base = OTHER; note = uridine-3'-phosphate
  modified_base 7: mod_base = OTHER; note = adenosine-3'-phosphate
  modified_base 8: mod_base = OTHER; note = cytidine-3'-phosphate
  modified_base 9: mod_base = OTHER; note = cytidine-3'-phosphate
  modified_base 10: mod_base = OTHER; note = uridine-3'-phosphate
  modified_base 11: mod_base = OTHER; note = guanosine-3'-phosphate
  modified_base 12: mod_base = OTHER; note = cytidine-3'-phosphate
  modified_base 13: mod_base = OTHER; note = guanosine-3'-phosphate
  modified_base 14: mod_base = OTHER; note = cytidine-3'-phosphate
  modified_base 15: mod_base = OTHER; note = cytidine-3'-phosphate
  modified_base 16: mod_base = OTHER; note = uridine-3'-phosphate
  modified_base 17: mod_base = OTHER; note = cytidine-3'-phosphate
  modified_base 18: mod_base = OTHER; note = cytidine-3'-phosphate
  modified_base 19: mod_base = OTHER; note = uridine-3'-phosphate
  misc_feature 1..19: note = RNA
  misc_feature 20..21: note = DNA
aacggtacctgcgcctccttt

SEQ ID NO: 1643 - DNA, 21 bp, synthetic construct
  source 1..21: mol_type = other DNA
  modified_base 1: mod_base = OTHER; note = adenosine-3'-phosphate
  modified_base 2: mod_base = OTHER; note = guanosine-3'-phosphate
  modified_base 3: mod_base = OTHER; note = guanosine-3'-phosphate
  modified_base 4: mod_base = OTHER; note = guanosine-3'-phosphate
  modified_base 5: mod_base = OTHER; note = adenosine-3'-phosphate
  modified_base 6: mod_base = OTHER; note = guanosine-3'-phosphate
  modified_base 7: mod_base = OTHER; note = adenosine-3'-phosphate
  modified_base 8: mod_base = OTHER; note = guanosine-3'-phosphate
  modified_base 9: mod_base = OTHER; note = guanosine-3'-phosphate
  modified_base 10: mod_base = OTHER; note = adenosine-3'-phosphate
  modified_base 11: mod_base = OTHER; note = adenosine-3'-phosphate
  modified_base 12: mod_base = OTHER; note = cytidine-3'-phosphate
  modified_base 13: mod_base = OTHER; note = guanosine-3'-phosphate
  modified_base 14: mod_base = OTHER; note = guanosine-3'-phosphate
  modified_base 15: mod_base = OTHER; note = uridine-3'-phosphate
  modified_base 16: mod_base = OTHER; note = adenosine-3'-phosphate
  modified_base 17: mod_base = OTHER; note = cytidine-3'-phosphate
  modified_base 18: mod_base = OTHER; note = cytidine-3'-phosphate
  modified_base 19: mod_base = OTHER; note = uridine-3'-phosphate
  misc_feature 1..19: note = RNA
  misc_feature 20..21: note = DNA
agggagaggaacggtaccttt

SEQ ID NO: 1644 - DNA, 21 bp, synthetic construct
  source 1..21: mol_type = other DNA
  modified_base 1: mod_base = OTHER; note = adenosine-3'-phosphate
  modified_base 2: mod_base = OTHER; note = guanosine-3'-phosphate
  modified_base 3: mod_base = OTHER; note = cytidine-3'-phosphate
  modified_base 4: mod_base = OTHER; note = adenosine-3'-phosphate
  modified_base 5: mod_base = OTHER; note = guanosine-3'-phosphate
  modified_base 6: mod_base = OTHER; note = cytidine-3'-phosphate
  modified_base 7: mod_base = OTHER; note = guanosine-3'-phosphate
  modified_base 8: mod_base = OTHER; note = cytidine-3'-phosphate
  modified_base 9: mod_base = OTHER; note = uridine-3'-phosphate
  modified_base 10: mod_base = OTHER; note = cytidine-3'-phosphate
  modified_base 11: mod_base = OTHER; note = cytidine-3'-phosphate
  modified_base 12: mod_base = OTHER; note = adenosine-3'-phosphate
  modified_base 13: mod_base = OTHER; note = guanosine-3'-phosphate
  modified_base 14: mod_base = OTHER; note = guanosine-3'-phosphate
  modified_base 15: mod_base = OTHER; note = guanosine-3'-phosphate
  modified_base 16: mod_base = OTHER; note = adenosine-3'-phosphate
  modified_base 17: mod_base = OTHER; note = guanosine-3'-phosphate
  modified_base 18: mod_base = OTHER; note = adenosine-3'-phosphate
  modified_base 19: mod_base = OTHER; note = guanosine-3'-phosphate
  misc_feature 1..19: note = RNA
  misc_feature 20..21: note = DNA
agcagcgctccagggagagtt

SEQ ID NO: 1645 - DNA, 21 bp, synthetic construct
  source 1..21: mol_type = other DNA
  modified_base 1: mod_base = OTHER; note = uridine-3'-phosphate
  modified_base 2: mod_base = OTHER; note = guanosine-3'-phosphate
  modified_base 3: mod_base = OTHER; note = uridine-3'-phosphate
  modified_base 4: mod_base = OTHER; note = cytidine-3'-phosphate
  modified_base 5: mod_base = OTHER; note = cytidine-3'-phosphate
  modified_base 6: mod_base = OTHER; note = guanosine-3'-phosphate
  modified_base 7: mod_base = OTHER; note = guanosine-3'-phosphate
  modified_base 8: mod_base = OTHER; note = guanosine-3'-phosphate
  modified_base 9: mod_base = OTHER; note = guanosine-3'-phosphate
  modified_base 10: mod_base = OTHER; note = cytidine-3'-phosphate
  modified_base 11: mod_base = OTHER; note = uridine-3'-phosphate
  modified_base 12: mod_base = OTHER; note = guanosine-3'-phosphate
  modified_base 13: mod_base = OTHER; note = adenosine-3'-phosphate
  modified_base 14: mod_base = OTHER; note = guanosine-3'-phosphate
  modified_base 15: mod_base = OTHER; note = cytidine-3'-phosphate
  modified_base 16: mod_base = OTHER; note = adenosine-3'-phosphate
  modified_base 17: mod_base = OTHER; note = guanosine-3'-phosphate
  modified_base 18: mod_base = OTHER; note = cytidine-3'-phosphate
  modified_base 19: mod_base = OTHER; note = guanosine-3'-phosphate
  misc_feature 1..19: note = RNA
  misc_feature 20..21: note = DNA
tgtccggggctgagcagcgtt

SEQ ID NO: 1646 - DNA, 21 bp, synthetic construct
  source 1..21: mol_type = other DNA
  modified_base 1: mod_base = OTHER; note = adenosine-3'-phosphate
  modified_base 2: mod_base = OTHER; note = guanosine-3'-phosphate
  modified_base 3: mod_base = OTHER; note = guanosine-3'-phosphate
  modified_base 4: mod_base = OTHER; note = adenosine-3'-phosphate
  modified_base 5: mod_base = OTHER; note = uridine-3'-phosphate
  modified_base 6: mod_base = OTHER; note = cytidine-3'-phosphate
  modified_base 7: mod_base = OTHER; note = cytidine-3'-phosphate
  modified_base 8: mod_base = OTHER; note = guanosine-3'-phosphate
  modified_base 9: mod_base = OTHER; note = uridine-3'-phosphate
  modified_base 10: mod_base = OTHER; note = guanosine-3'-phosphate
  modified_base 11: mod_base = OTHER; note = cytidine-3'-phosphate
  modified_base 12: mod_base = OTHER; note = adenosine-3'-phosphate
  modified_base 13: mod_base = OTHER; note = cytidine-3'-phosphate
  modified_base 14: mod_base = OTHER; note = guanosine-3'-phosphate
  modified_base 15: mod_base = OTHER; note = uridine-3'-phosphate
  modified_base 16: mod_base = OTHER; note = cytidine-3'-phosphate
  modified_base 17: mod_base = OTHER; note = cytidine-3'-phosphate
  modified_base 18: mod_base = OTHER; note = guanosine-3'-phosphate
  modified_base 19: mod_base = OTHER; note = guanosine-3'-phosphate
  misc_feature 1..19: note = RNA
  misc_feature 20..21: note = DNA
aggatccgtgcacgtccggtt

SEQ ID NO: 1647 - DNA, 21 bp, synthetic construct
  source 1..21: mol_type = other DNA
  modified_base 1: mod_base = OTHER; note = uridine-3'-phosphate
  modified_base 2: mod_base = OTHER; note = guanosine-3'-phosphate
  modified_base 3: mod_base = OTHER; note = guanosine-3'-phosphate
  modified_base 4: mod_base = OTHER; note = guanosine-3'-phosphate
  modified_base 5: mod_base = OTHER; note = adenosine-3'-phosphate
  modified_base 6: mod_base = OTHER; note = guanosine-3'-phosphate
  modified_base 7: mod_base = OTHER; note = guanosine-3'-phosphate
  modified_base 8: mod_base = OTHER; note = adenosine-3'-phosphate
  modified_base 9: mod_base = OTHER; note = uridine-3'-phosphate
  modified_base 10: mod_base = OTHER; note = guanosine-3'-phosphate
  modified_base 11: mod_base = OTHER; note = guanosine-3'-phosphate
  modified_base 12: mod_base = OTHER; note = adenosine-3'-phosphate
  modified_base 13: mod_base = OTHER; note = guanosine-3'-phosphate
  modified_base 14: mod_base = OTHER; note = guanosine-3'-phosphate
  modified_base 15: mod_base = OTHER; note = adenosine-3'-phosphate
  modified_base 16: mod_base = OTHER; note = uridine-3'-phosphate
  modified_base 17: mod_base = OTHER; note = cytidine-3'-phosphate
  modified_base 18: mod_base = OTHER; note = cytidine-3'-phosphate
  modified_base 19: mod_base = OTHER; note = guanosine-3'-phosphate
  misc_feature 1..19: note = RNA
  misc_feature 20..21: note = DNA
tgggaggatggaggatccgtt

SEQ ID NO: 1648 - DNA, 21 bp, synthetic construct
  source 1..21: mol_type = other DNA
  modified_base 1: mod_base = OTHER; note = uridine-3'-phosphate
  modified_base 2: mod_base = OTHER; note = adenosine-3'-phosphate
  modified_base 3: mod_base = OTHER; note = guanosine-3'-phosphate
  modified_base 4: mod_base = OTHER; note = cytidine-3'-phosphate
  modified_base 5: mod_base = OTHER; note = adenosine-3'-phosphate
  modified_base 6: mod_base = OTHER; note = uridine-3'-phosphate
  modified_base 7: mod_base = OTHER; note = guanosine-3'-phosphate
  modified_base 8: mod_base = OTHER; note = cytidine-3'-phosphate
  modified_base 9: mod_base = OTHER; note = cytidine-3'-phosphate
  modified_base 10: mod_base = OTHER; note = guanosine-3'-phosphate
  modified_base 11: mod_base = OTHER; note = guanosine-3'-phosphate
  modified_base 12: mod_base = OTHER; note = guanosine-3'-phosphate
  modified_base 13: mod_base = OTHER; note = guanosine-3'-phosphate
  modified_base 14: mod_base = OTHER; note = adenosine-3'-phosphate
  modified_base 15: mod_base = OTHER; note = guanosine-3'-phosphate
  modified_base 16: mod_base = OTHER; note = guanosine-3'-phosphate
  modified_base 17: mod_base = OTHER; note = adenosine-3'-phosphate
  modified_base 18: mod_base = OTHER; note = uridine-3'-phosphate
  modified_base 19: mod_base = OTHER; note = guanosine-3'-phosphate
  misc_feature 1..19: note = RNA
  misc_feature 20..21: note = DNA
tagcatgccggggaggatgtt

SEQ ID NO: 1649 - DNA, 21 bp, synthetic construct
  source 1..21: mol_type = other DNA
  modified_base 1: mod_base = OTHER; note = uridine-3'-phosphate
  modified_base 2: mod_base = OTHER; note = adenosine-3'-phosphate
  modified_base 3: mod_base = OTHER; note = adenosine-3'-phosphate
  modified_base 4: mod_base = OTHER; note = cytidine-3'-phosphate
  modified_base 5: mod_base = OTHER; note = cytidine-3'-phosphate
  modified_base 6: mod_base = OTHER; note = cytidine-3'-phosphate
  modified_base 7: mod_base = OTHER; note = uridine-3'-phosphate
  modified_base 8: mod_base = OTHER; note = guanosine-3'-phosphate
  modified_base 9: mod_base = OTHER; note = cytidine-3'-phosphate
  modified_base 10: mod_base = OTHER; note = guanosine-3'-phosphate
  modified_base 11: mod_base = OTHER; note = cytidine-3'-phosphate
  modified_base 12: mod_base = OTHER; note = adenosine-3'-phosphate
  modified_base 13: mod_base = OTHER; note = guanosine-3'-phosphate
  modified_base 14: mod_base = OTHER; note = adenosine-3'-phosphate
  modified_base 15: mod_base = OTHER; note = guanosine-3'-phosphate
  modified_base 16: mod_base = OTHER; note = cytidine-3'-phosphate
  modified_base 17: mod_base = OTHER; note = adenosine-3'-phosphate
  modified_base 18: mod_base = OTHER; note = uridine-3'-phosphate
  modified_base 19: mod_base = OTHER; note = guanosine-3'-phosphate
  misc_feature 1..19: note = RNA
  misc_feature 20..21: note = DNA
taaccctgcgcagagcatgtt

SEQ ID NO: 1650 - DNA, 21 bp, synthetic construct
  source 1..21: mol_type = other DNA
  modified_base 1: mod_base = OTHER; note = uridine-3'-phosphate
  modified_base 2: mod_base = OTHER; note = cytidine-3'-phosphate
  modified_base 3: mod_base = OTHER; note = cytidine-3'-phosphate
  modified_base 4: mod_base = OTHER; note = guanosine-3'-phosphate
  modified_base 5: mod_base = OTHER; note = cytidine-3'-phosphate
  modified_base 6: mod_base = OTHER; note = cytidine-3'-phosphate
  modified_base 7: mod_base = OTHER; note = cytidine-3'-phosphate
  modified_base 8: mod_base = OTHER; note = uridine-3'-phosphate
  modified_base 9: mod_base = OTHER; note = cytidine-3'-phosphate
  modified_base 10: mod_base = OTHER; note = guanosine-3'-phosphate
  modified_base 11: mod_base = OTHER; note = adenosine-3'-phosphate
  modified_base 12: mod_base = OTHER; note = guanosine-3'-phosphate
  modified_base 13: mod_base = OTHER; note = guanosine-3'-phosphate
  modified_base 14: mod_base = OTHER; note = adenosine-3'-phosphate
  modified_base 15: mod_base = OTHER; note = adenosine-3'-phosphate
  modified_base 16: mod_base = OTHER; note = cytidine-3'-phosphate
  modified_base 17: mod_base = OTHER; note = cytidine-3'-phosphate
  modified_base 18: mod_base = OTHER; note = cytidine-3'-phosphate
  modified_base 19: mod_base = OTHER; note = uridine-3'-phosphate
  misc_feature 1..19: note = RNA
  misc_feature 20..21: note = DNA
tccgccctcgaggaacccttt

SEQ ID NO: 1651 - DNA, 21 bp, synthetic construct
  source 1..21: mol_type = other DNA
  modified_base 1: mod_base = OTHER; note = adenosine-3'-phosphate
  modified_base 2: mod_base = OTHER; note = cytidine-3'-phosphate
  modified_base 3: mod_base = OTHER; note = guanosine-3'-phosphate
  modified_base 4: mod_base = OTHER; note = cytidine-3'-phosphate
  modified_base 5: mod_base = OTHER; note = adenosine-3'-phosphate
  modified_base 6: mod_base = OTHER; note = uridine-3'-phosphate
  modified_base 7: mod_base = OTHER; note = cytidine-3'-phosphate
  modified_base 8: mod_base = OTHER; note = guanosine-3'-phosphate
  modified_base 9: mod_base = OTHER; note = guanosine-3'-phosphate
  modified_base 10: mod_base = OTHER; note = uridine-3'-phosphate
  modified_base 11: mod_base = OTHER; note = guanosine-3'-phosphate
  modified_base 12: mod_base = OTHER; note = cytidine-3'-phosphate
  modified_base 13: mod_base = OTHER; note = cytidine-3'-phosphate
  modified_base 14: mod_base = OTHER; note = guanosine-3'-phosphate
  modified_base 15: mod_base = OTHER; note = cytidine-3'-phosphate
  modified_base 16: mod_base = OTHER; note = cytidine-3'-phosphate
  modified_base 17: mod_base = OTHER; note = cytidine-3'-phosphate
  modified_base 18: mod_base = OTHER; note = uridine-3'-phosphate
  modified_base 19: mod_base = OTHER; note = cytidine-3'-phosphate
  misc_feature 1..19: note = RNA
  misc_feature 20..21: note = DNA
acgcatcggtgccgccctctt

SEQ ID NO: 1652 - DNA, 21 bp, synthetic construct
  source 1..21: mol_type = other DNA
  modified_base 1: mod_base = OTHER; note = adenosine-3'-phosphate
  modified_base 2: mod_base = OTHER; note = adenosine-3'-phosphate
  modified_base 3: mod_base = OTHER; note = uridine-3'-phosphate
  modified_base 4: mod_base = OTHER; note = cytidine-3'-phosphate
  modified_base 5: mod_base = OTHER; note = adenosine-3'-phosphate
  modified_base 6: mod_base = OTHER; note = cytidine-3'-phosphate
  modified_base 7: mod_base = OTHER; note = cytidine-3'-phosphate
  modified_base 8: mod_base = OTHER; note = cytidine-3'-phosphate
  modified_base 9: mod_base = OTHER; note = uridine-3'-phosphate
  modified_base 10: mod_base = OTHER; note = guanosine-3'-phosphate
  modified_base 11: mod_base = OTHER; note = guanosine-3'-phosphate
  modified_base 12: mod_base = OTHER; note = cytidine-3'-phosphate
  modified_base 13: mod_base = OTHER; note = adenosine-3'-phosphate
  modified_base 14: mod_base = OTHER; note = cytidine-3'-phosphate
  modified_base 15: mod_base = OTHER; note = guanosine-3'-phosphate
  modified_base 16: mod_base = OTHER; note = cytidine-3'-phosphate
  modified_base 17: mod_base = OTHER; note = adenosine-3'-phosphate
  modified_base 18: mod_base = OTHER; note = uridine-3'-phosphate
  modified_base 19: mod_base = OTHER; note = cytidine-3'-phosphate
  misc_feature 1..19: note = RNA
  misc_feature 20..21: note = DNA
aatcaccctggcacgcatctt

SEQ ID NO: 1653 - DNA, 21 bp, synthetic construct
  source 1..21: mol_type = other DNA
  modified_base 1: mod_base = OTHER; note = uridine-3'-phosphate
  modified_base 2: mod_base = OTHER; note = guanosine-3'-phosphate
  modified_base 3: mod_base = OTHER; note = guanosine-3'-phosphate
  modified_base 4: mod_base = OTHER; note = cytidine-3'-phosphate
  modified_base 5: mod_base = OTHER; note = cytidine-3'-phosphate
  modified_base 6: mod_base = OTHER; note = uridine-3'-phosphate
  modified_base 7: mod_base = OTHER; note = cytidine-3'-phosphate
  modified_base 8: mod_base = OTHER; note = cytidine-3'-phosphate
  modified_base 9: mod_base = OTHER; note = guanosine-3'-phosphate
  modified_base 10: mod_base = OTHER; note = guanosine-3'-phosphate
  modified_base 11: mod_base = OTHER; note = adenosine-3'-phosphate
  modified_base 12: mod_base = OTHER; note = adenosine-3'-phosphate
  modified_base 13: mod_base = OTHER; note = uridine-3'-phosphate
  modified_base 14: mod_base = OTHER; note = cytidine-3'-phosphate
  modified_base 15: mod_base = OTHER; note = adenosine-3'-phosphate
  modified_base 16: mod_base = OTHER; note = cytidine-3'-phosphate
  modified_base 17: mod_base = OTHER; note = cytidine-3'-phosphate
  modified_base 18: mod_base = OTHER; note = cytidine-3'-phosphate
  modified_base 19: mod_base = OTHER; note = uridine-3'-phosphate
  misc_feature 1..19: note = RNA
  misc_feature 20..21: note = DNA
tggcctccggaatcacccttt

SEQ ID NO: 1654 - DNA, 21 bp, synthetic construct
  source 1..21: mol_type = other DNA
  modified_base 1: mod_base = OTHER; note = adenosine-3'-phosphate
  modified_base 2: mod_base = OTHER; note = cytidine-3'-phosphate
  modified_base 3: mod_base = OTHER; note = adenosine-3'-phosphate
  modified_base 4: mod_base = OTHER; note = cytidine-3'-phosphate
  modified_base 5: mod_base = OTHER; note = adenosine-3'-phosphate
  modified_base 6: mod_base = OTHER; note = cytidine-3'-phosphate
  modified_base 7: mod_base = OTHER; note = cytidine-3'-phosphate
  modified_base 8: mod_base = OTHER; note = adenosine-3'-phosphate
  modified_base 9: mod_base = OTHER; note = guanosine-3'-phosphate
  modified_base 10: mod_base = OTHER; note = cytidine-3'-phosphate
  modified_base 11: mod_base = OTHER; note = guanosine-3'-phosphate
  modified_base 12: mod_base = OTHER; note = guanosine-3'-phosphate
  modified_base 13: mod_base = OTHER; note = guanosine-3'-phosphate
  modified_base 14: mod_base = OTHER; note = cytidine-3'-phosphate
  modified_base 15: mod_base = OTHER; note = cytidine-3'-phosphate
  modified_base 16: mod_base = OTHER; note = uridine-3'-phosphate
  modified_base 17: mod_base = OTHER; note = cytidine-3'-phosphate
  modified_base 18: mod_base = OTHER; note = cytidine-3'-phosphate
  modified_base 19: mod_base = OTHER; note = guanosine-3'-phosphate
  misc_feature 1..19: note = RNA
  misc_feature 20..21: note = DNA
acacaccagcgggcctccgtt

SEQ ID NO: 1655 - DNA, 21 bp, synthetic construct
  source 1..21: mol_type = other DNA
  modified_base 1: mod_base = OTHER; note = adenosine-3'-phosphate
  modified_base 2: mod_base = OTHER; note = guanosine-3'-phosphate
  modified_base 3: mod_base = OTHER; note = cytidine-3'-phosphate
  modified_base 4: mod_base = OTHER; note = uridine-3'-phosphate
  modified_base 5: mod_base = OTHER; note = uridine-3'-phosphate
  modified_base 6: mod_base = OTHER; note = guanosine-3'-phosphate
  modified_base 7: mod_base = OTHER; note = guanosine-3'-phosphate
  modified_base 8: mod_base = OTHER; note = uridine-3'-phosphate
  modified_base 9: mod_base = OTHER; note = cytidine-3'-phosphate
  modified_base 10: mod_base = OTHER; note = cytidine-3'-phosphate
  modified_base 11: mod_base = OTHER; note = uridine-3'-phosphate
  modified_base 12: mod_base = OTHER; note = cytidine-3'-phosphate
  modified_base 13: mod_base = OTHER; note = adenosine-3'-phosphate
  modified_base 14: mod_base = OTHER; note = cytidine-3'-phosphate
  modified_base 15: mod_base = OTHER; note = adenosine-3'-phosphate
  modified_base 16: mod_base = OTHER; note = cytidine-3'-phosphate
  modified_base 17: mod_base = OTHER; note = adenosine-3'-phosphate
  modified_base 18: mod_base = OTHER; note = cytidine-3'-phosphate
  modified_base 19: mod_base = OTHER; note = cytidine-3'-phosphate
  misc_feature 1..19: note = RNA
  misc_feature 20..21: note = DNA
agcttggtcctcacacacctt

SEQ ID NO: 1656 - DNA, 21 bp, synthetic construct
  source 1..21: mol_type = other DNA
  modified_base 1: mod_base = OTHER; note = uridine-3'-phosphate
  modified_base 2: mod_base = OTHER; note = cytidine-3'-phosphate
  modified_base 3: mod_base = OTHER; note = guanosine-3'-phosphate
  modified_base 4: mod_base = OTHER; note = guanosine-3'-phosphate
  modified_base 5: mod_base = OTHER; note = cytidine-3'-phosphate
  modified_base 6: mod_base = OTHER; note = guanosine-3'-phosphate
  modified_base 7: mod_base = OTHER; note = cytidine-3'-phosphate
  modified_base 8: mod_base = OTHER; note = uridine-3'-phosphate
  modified_base 9: mod_base = OTHER; note = cytidine-3'-phosphate
  modified_base 10: mod_base = OTHER; note = uridine-3'-phosphate
  modified_base 11: mod_base = OTHER; note = guanosine-3'-phosphate
  modified_base 12: mod_base = OTHER; note = cytidine-3'-phosphate
  modified_base 13: mod_base = OTHER; note = adenosine-3'-phosphate
  modified_base 14: mod_base = OTHER; note = guanosine-3'-phosphate
  modified_base 15: mod_base = OTHER; note = cytidine-3'-phosphate
  modified_base 16: mod_base = OTHER; note = uridine-3'-phosphate
  modified_base 17: mod_base = OTHER; note = uridine-3'-phosphate
  modified_base 18: mod_base = OTHER; note = guanosine-3'-phosphate
  modified_base 19: mod_base = OTHER; note = guanosine-3'-phosphate
  misc_feature 1..19: note = RNA
  misc_feature 20..21: note = DNA
tcggcgctctgcagcttggtt

SEQ ID NO: 1657 - DNA, 21 bp, synthetic construct
  source 1..21: mol_type = other DNA
  modified_base 1: mod_base = OTHER; note = uridine-3'-phosphate
  modified_base 2: mod_base = OTHER; note = adenosine-3'-phosphate
  modified_base 3: mod_base = OTHER; note = guanosine-3'-phosphate
  modified_base 4: mod_base = OTHER; note = guanosine-3'-phosphate
  modified_base 5: mod_base = OTHER; note = guanosine-3'-phosphate
  modified_base 6: mod_base = OTHER; note = uridine-3'-phosphate
  modified_base 7: mod_base = OTHER; note = guanosine-3'-phosphate
  modified_base 8: mod_base = OTHER; note = adenosine-3'-phosphate
  modified_base 9: mod_base = OTHER; note = guanosine-3'-phosphate
  modified_base 10: mod_base = OTHER; note = cytidine-3'-phosphate
  modified_base 11: mod_base = OTHER; note = cytidine-3'-phosphate
  modified_base 12: mod_base = OTHER; note = guanosine-3'-phosphate
  modified_base 13: mod_base = OTHER; note = guanosine-3'-phosphate
  modified_base 14: mod_base = OTHER; note = cytidine-3'-phosphate
  modified_base 15: mod_base = OTHER; note = guanosine-3'-phosphate
  modified_base 16: mod_base = OTHER; note = cytidine-3'-phosphate
  modified_base 17: mod_base = OTHER; note = uridine-3'-phosphate
  modified_base 18: mod_base = OTHER; note = cytidine-3'-phosphate
  modified_base 19: mod_base = OTHER; note = uridine-3'-phosphate
  misc_feature 1..19: note = RNA
  misc_feature 20..21: note = DNA
tagggtgagccggcgctcttt

SEQ ID NO: 1658 - DNA, 21 bp, synthetic construct
  source 1..21: mol_type = other DNA
  modified_base 1: mod_base = OTHER; note = adenosine-3'-phosphate
  modified_base 2: mod_base = OTHER; note = uridine-3'-phosphate
  modified_base 3: mod_base = OTHER; note = guanosine-3'-phosphate
  modified_base 4: mod_base = OTHER; note = adenosine-3'-phosphate
  modified_base 5: mod_base = OTHER; note = uridine-3'-phosphate
  modified_base 6: mod_base = OTHER; note = guanosine-3'-phosphate
  modified_base 7: mod_base = OTHER; note = cytidine-3'-phosphate
  modified_base 8: mod_base = OTHER; note = cytidine-3'-phosphate
  modified_base 9: mod_base = OTHER; note = uridine-3'-phosphate
  modified_base 10: mod_base = OTHER; note = uridine-3'-phosphate
  modified_base 11: mod_base = OTHER; note = guanosine-3'-phosphate
  modified_base 12: mod_base = OTHER; note = cytidine-3'-phosphate
  modified_base 13: mod_base = OTHER; note = adenosine-3'-phosphate
  modified_base 14: mod_base = OTHER; note = guanosine-3'-phosphate
  modified_base 15: mod_base = OTHER; note = guanosine-3'-phosphate
  modified_base 16: mod_base = OTHER; note = guanosine-3'-phosphate
  modified_base 17: mod_base = OTHER; note = uridine-3'-phosphate
  modified_base 18: mod_base = OTHER; note = guanosine-3'-phosphate
  modified_base 19: mod_base = OTHER; note = adenosine-3'-phosphate
  misc_feature 1..19: note = RNA
  misc_feature 20..21: note = DNA
atgatgccttgcagggtgatt

SEQ ID NO: 1659 - DNA, 21 bp, synthetic construct
  source 1..21: mol_type = other DNA
  modified_base 1: mod_base = OTHER; note = adenosine-3'-phosphate
  modified_base 2: mod_base = OTHER; note = uridine-3'-phosphate
  modified_base 3: mod_base = OTHER; note = cytidine-3'-phosphate
  modified_base 4: mod_base = OTHER; note = cytidine-3'-phosphate
  modified_base 5: mod_base = OTHER; note = cytidine-3'-phosphate
  modified_base 6: mod_base = OTHER; note = cytidine-3'-phosphate
  modified_base 7: mod_base = OTHER; note = adenosine-3'-phosphate
  modified_base 8: mod_base = OTHER; note = guanosine-3'-phosphate
  modified_base 9: mod_base = OTHER; note = cytidine-3'-phosphate
  modified_base 10: mod_base = OTHER; note = uridine-3'-phosphate
  modified_base 11: mod_base = OTHER; note = guanosine-3'-phosphate
  modified_base 12: mod_base = OTHER; note = adenosine-3'-phosphate
  modified_base 13: mod_base = OTHER; note = uridine-3'-phosphate
  modified_base 14: mod_base = OTHER; note = guanosine-3'-phosphate
  modified_base 15: mod_base = OTHER; note = adenosine-3'-phosphate
  modified_base 16: mod_base = OTHER; note = uridine-3'-phosphate
  modified_base 17: mod_base = OTHER; note = guanosine-3'-phosphate
  modified_base 18: mod_base = OTHER; note = cytidine-3'-phosphate
  modified_base 19: mod_base = OTHER; note = cytidine-3'-phosphate
  misc_feature 1..19: note = RNA
  misc_feature 20..21: note = DNA
atccccagctgatgatgcctt

SEQ ID NO: 1660 - DNA, 21 bp, synthetic construct
  source 1..21: mol_type = other DNA
  modified_base 1: mod_base = OTHER; note = adenosine-3'-phosphate
  modified_base 2: mod_base = OTHER; note = cytidine-3'-phosphate
  modified_base 3: mod_base = OTHER; note = cytidine-3'-phosphate
  modified_base 4: mod_base = OTHER; note = adenosine-3'-phosphate
  modified_base 5: mod_base = OTHER; note = cytidine-3'-phosphate
  modified_base 6: mod_base = OTHER; note = adenosine-3'-phosphate
  modified_base 7: mod_base = OTHER; note = guanosine-3'-phosphate
  modified_base 8: mod_base = OTHER; note = cytidine-3'-phosphate
  modified_base 9: mod_base = OTHER; note = cytidine-3'-phosphate
  modified_base 10: mod_base = OTHER; note = cytidine-3'-phosphate
  modified_base 11: mod_base = OTHER; note = guanosine-3'-phosphate
  modified_base 12: mod_base = OTHER; note = adenosine-3'-phosphate
  modified_base 13: mod_base = OTHER; note = uridine-3'-phosphate
  modified_base 14: mod_base = OTHER; note = cytidine-3'-phosphate
  modified_base 15: mod_base = OTHER; note = cytidine-3'-phosphate
  modified_base 16: mod_base = OTHER; note = cytidine-3'-phosphate
  modified_base 17: mod_base = OTHER; note = cytidine-3'-phosphate
  modified_base 18: mod_base = OTHER; note = adenosine-3'-phosphate
  modified_base 19: mod_base = OTHER; note = guanosine-3'-phosphate
  misc_feature 1..19: note = RNA
  misc_feature 20..21: note = DNA
accacagcccgatccccagtt

SEQ ID NO: 1661 - DNA, 21 bp, synthetic construct
  source 1..21: mol_type = other DNA
  modified_base 1: mod_base = OTHER; note = uridine-3'-phosphate
  modified_base 2: mod_base = OTHER; note = cytidine-3'-phosphate
  modified_base 3: mod_base = OTHER; note = uridine-3'-phosphate
  modified_base 4: mod_base = OTHER; note = uridine-3'-phosphate
  modified_base 5: mod_base = OTHER; note = guanosine-3'-phosphate
  modified_base 6: mod_base = OTHER; note = uridine-3'-phosphate
  modified_base 7: mod_base = OTHER; note = uridine-3'-phosphate
  modified_base 8: mod_base = OTHER; note = guanosine-3'-phosphate
  modified_base 9: mod_base = OTHER; note = cytidine-3'-phosphate
  modified_base 10: mod_base = OTHER; note = guanosine-3'-phosphate
  modified_base 11: mod_base = OTHER; note = guanosine-3'-phosphate
  modified_base 12: mod_base = OTHER; note = uridine-3'-phosphate
  modified_base 13: mod_base = OTHER; note = cytidine-3'-phosphate
  modified_base 14: mod_base = OTHER; note = adenosine-3'-phosphate
  modified_base 15: mod_base = OTHER; note = cytidine-3'-phosphate
  modified_base 16: mod_base = OTHER; note = cytidine-3'-phosphate
  modified_base 17: mod_base = OTHER; note = adenosine-3'-phosphate
  modified_base 18: mod_base = OTHER; note = cytidine-3'-phosphate
  modified_base 19: mod_base = OTHER; note = adenosine-3'-phosphate
  misc_feature 1..19: note = RNA
  misc_feature 20..21: note = DNA
tcttgttgcggtcaccacatt

SEQ ID NO: 1662 - DNA, 21 bp, synthetic construct
  source 1..21: mol_type = other DNA
  modified_base 1: mod_base = OTHER; note = uridine-3'-phosphate
  modified_base 2: mod_base = OTHER; note = uridine-3'-phosphate
  modified_base 3: mod_base = OTHER; note = adenosine-3'-phosphate
  modified_base 4: mod_base = OTHER; note = guanosine-3'-phosphate
  modified_base 5: mod_base = OTHER; note = adenosine-3'-phosphate
  modified_base 6: mod_base = OTHER; note = cytidine-3'-phosphate
  modified_base 7: mod_base = OTHER; note = guanosine-3'-phosphate
  modified_base 8: mod_base = OTHER; note = cytidine-3'-phosphate
  modified_base 9: mod_base = OTHER; note = cytidine-3'-phosphate
  modified_base 10: mod_base = OTHER; note = uridine-3'-phosphate
  modified_base 11: mod_base = OTHER; note = guanosine-3'-phosphate
  modified_base 12: mod_base = OTHER; note = guanosine-3'-phosphate
  modified_base 13: mod_base = OTHER; note = cytidine-3'-phosphate
  modified_base 14: mod_base = OTHER; note = uridine-3'-phosphate
  modified_base 15: mod_base = OTHER; note = uridine-3'-phosphate
  modified_base 16: mod_base = OTHER; note = guanosine-3'-phosphate
  modified_base 17: mod_base = OTHER; note = uridine-3'-phosphate
  modified_base 18: mod_base = OTHER; note = uridine-3'-phosphate
  modified_base 19: mod_base = OTHER; note = guanosine-3'-phosphate
  misc_feature 1..19: note = RNA
  misc_feature 20..21: note = DNA
ttagacgcctggcttgttgtt

SEQ ID NO: 1663 - DNA, 21 bp, synthetic construct
  source 1..21: mol_type = other DNA
  modified_base 1: mod_base = OTHER; note = uridine-3'-phosphate
  modified_base 2: mod_base = OTHER; note = adenosine-3'-phosphate
  modified_base 3: mod_base = OTHER; note = cytidine-3'-phosphate
  modified_base 4: mod_base = OTHER; note = adenosine-3'-phosphate
  modified_base 5: mod_base = OTHER; note = uridine-3'-phosphate
  modified_base 6: mod_base = OTHER; note = cytidine-3'-phosphate
  modified_base 7: mod_base = OTHER; note = guanosine-3'-phosphate
  modified_base 8: mod_base = OTHER; note = guanosine-3'-phosphate
  modified_base 9: mod_base = OTHER; note = uridine-3'-phosphate
  modified_base 10: mod_base = OTHER; note = guanosine-3'-phosphate
  modified_base 11: mod_base = OTHER; note = uridine-3'-phosphate
  modified_base 12: mod_base = OTHER; note = adenosine-3'-phosphate
  modified_base 13: mod_base = OTHER; note = guanosine-3'-phosphate
  modified_base 14: mod_base = OTHER; note = adenosine-3'-phosphate
  modified_base 15: mod_base = OTHER; note = cytidine-3'-phosphate
  modified_base 16: mod_base = OTHER; note = guanosine-3'-phosphate
  modified_base 17: mod_base = OTHER; note = cytidine-3'-phosphate
  modified_base 18: mod_base = OTHER; note = cytidine-3'-phosphate
  modified_base 19: mod_base = OTHER; note = uridine-3'-phosphate
  misc_feature 1..19: note = RNA
  misc_feature 20..21: note = DNA
tacatcggtgtagacgccttt

SEQ ID NO: 1664 - DNA, 21 bp, synthetic construct
  source 1..21: mol_type = other DNA
  modified_base 1: mod_base = OTHER; note = uridine-3'-phosphate
  modified_base 2: mod_base = OTHER; note = cytidine-3'-phosphate
  modified_base 3: mod_base = OTHER; note = adenosine-3'-phosphate
  modified_base 4: mod_base = OTHER; note = guanosine-3'-phosphate
  modified_base 5: mod_base = OTHER; note = guanosine-3'-phosphate
  modified_base 6: mod_base = OTHER; note = uridine-3'-phosphate
  modified_base 7: mod_base = OTHER; note = adenosine-3'-phosphate
  modified_base 8: mod_base = OTHER; note = guanosine-3'-phosphate
  modified_base 9: mod_base = OTHER; note = uridine-3'-phosphate
  modified_base 10: mod_base = OTHER; note = adenosine-3'-phosphate
  modified_base 11: mod_base = OTHER; note = guanosine-3'-phosphate
  modified_base 12: mod_base = OTHER; note = guanosine-3'-phosphate
  modified_base 13: mod_base = OTHER; note = cytidine-3'-phosphate
  modified_base 14: mod_base = OTHER; note = cytidine-3'-phosphate
  modified_base 15: mod_base = OTHER; note = adenosine-3'-phosphate
  modified_base 16: mod_base = OTHER; note = cytidine-3'-phosphate
  modified_base 17: mod_base = OTHER; note = adenosine-3'-phosphate
  modified_base 18: mod_base = OTHER; note = uridine-3'-phosphate
  modified_base 19: mod_base = OTHER; note = cytidine-3'-phosphate
  misc_feature 1..19: note = RNA
  misc_feature 20..21: note = DNA
tcaggtagtaggccacatctt

SEQ ID NO: 1665 - DNA, 21 bp, synthetic construct
  source 1..21: mol_type = other DNA
  modified_base 1: mod_base = OTHER; note = uridine-3'-phosphate
  modified_base 2: mod_base = OTHER; note = guanosine-3'-phosphate
  modified_base 3: mod_base = OTHER; note = adenosine-3'-phosphate
  modified_base 4: mod_base = OTHER; note = uridine-3'-phosphate
  modified_base 5: mod_base = OTHER; note = cytidine-3'-phosphate
  modified_base 6: mod_base = OTHER; note = cytidine-3'-phosphate
  modified_base 7: mod_base = OTHER; note = adenosine-3'-phosphate
  modified_base 8: mod_base = OTHER; note = guanosine-3'-phosphate
  modified_base 9: mod_base = OTHER; note = guanosine-3'-phosphate
  modified_base 10: mod_base = OTHER; note = cytidine-3'-phosphate
  modified_base 11: mod_base = OTHER; note = cytidine-3'-phosphate
  modified_base 12: mod_base = OTHER; note = adenosine-3'-phosphate
  modified_base 13: mod_base = OTHER; note = guanosine-3'-phosphate
  modified_base 14: mod_base = OTHER; note = guanosine-3'-phosphate
  modified_base 15: mod_base = OTHER; note = uridine-3'-phosphate
  modified_base 16: mod_base = OTHER; note = adenosine-3'-phosphate
  modified_base 17: mod_base = OTHER; note = guanosine-3'-phosphate
  modified_base 18: mod_base = OTHER; note = uridine-3'-phosphate
  modified_base 19: mod_base = OTHER; note = adenosine-3'-phosphate
  misc_feature 1..19: note = RNA
  misc_feature 20..21: note = DNA
tgatccaggccaggtagtatt

SEQ ID NO: 1666 - DNA, 21 bp, synthetic construct
  source 1..21: mol_type = other DNA
  modified_base 1: mod_base = OTHER; note = uridine-3'-phosphate
  modified_base 2: mod_base = OTHER; note = guanosine-3'-phosphate
  modified_base 3: mod_base = OTHER; note = uridine-3'-phosphate
  modified_base 4: mod_base = OTHER; note = guanosine-3'-phosphate
  modified_base 5: mod_base = OTHER; note = uridine-3'-phosphate
  modified_base 6: mod_base = OTHER; note = guanosine-3'-phosphate
  modified_base 7: mod_base = OTHER; note = cytidine-3'-phosphate
  modified_base 8: mod_base = OTHER; note = uridine-3'-phosphate
  modified_base 9: mod_base = OTHER; note = cytidine-3'-phosphate
  modified_base 10: mod_base = OTHER; note = cytidine-3'-phosphate
  modified_base 11: mod_base = OTHER; note = cytidine-3'-phosphate
  modified_base 12: mod_base = OTHER; note = guanosine-3'-phosphate
  modified_base 13: mod_base = OTHER; note = guanosine-3'-phosphate
  modified_base 14: mod_base = OTHER; note = adenosine-3'-phosphate
  modified_base 15: mod_base = OTHER; note = uridine-3'-phosphate
  modified_base 16: mod_base = OTHER; note = cytidine-3'-phosphate
  modified_base 17: mod_base = OTHER; note = cytidine-3'-phosphate
  modified_base 18: mod_base = OTHER; note = adenosine-3'-phosphate
  modified_base 19: mod_base = OTHER; note = guanosine-3'-phosphate
  misc_feature 1..19: note = RNA
  misc_feature 20..21: note = DNA
tgtgtgctcccggatccagtt

SEQ ID NO: 1667 - DNA, 21 bp, synthetic construct
  source 1..21: mol_type = other DNA
  modified_base 1: mod_base = OTHER; note = adenosine-3'-phosphate
  modified_base 2: mod_base = OTHER; note = adenosine-3'-phosphate
  modified_base 3: mod_base = OTHER; note = uridine-3'-phosphate
  modified_base 4: mod_base = OTHER; note = cytidine-3'-phosphate
  modified_base 5: mod_base = OTHER; note = adenosine-3'-phosphate
  modified_base 6: mod_base = OTHER; note = guanosine-3'-phosphate
  modified_base 7: mod_base = OTHER; note = guanosine-3'-phosphate
  modified_base 8: mod_base = OTHER; note = adenosine-3'-phosphate
  modified_base 9: mod_base = OTHER; note = adenosine-3'-phosphate
  modified_base 10: mod_base = OTHER; note = adenosine-3'-phosphate
  modified_base 11: mod_base = OTHER; note = cytidine-3'-phosphate
  modified_base 12: mod_base = OTHER; note = guanosine-3'-phosphate
  modified_base 13: mod_base = OTHER; note = guanosine-3'-phosphate
  modified_base 14: mod_base = OTHER; note = uridine-3'-phosphate
  modified_base 15: mod_base = OTHER; note = guanosine-3'-phosphate
  modified_base 16: mod_base = OTHER; note = uridine-3'-phosphate
  modified_base 17: mod_base = OTHER; note = guanosine-3'-phosphate
  modified_base 18: mod_base = OTHER; note = cytidine-3'-phosphate
  modified_base 19: mod_base = OTHER; note = uridine-3'-phosphate
  misc_feature 1..19: note = RNA
  misc_feature 20..21: note = DNA
aatcaggaaacggtgtgcttt

SEQ ID NO: 1668 - DNA, 21 bp, synthetic construct
  source 1..21: mol_type = other DNA
  modified_base 1: mod_base = OTHER; note = adenosine-3'-phosphate
  modified_base 2: mod_base = OTHER; note = guanosine-3'-phosphate
  modified_base 3: mod_base = OTHER; note = uridine-3'-phosphate
  modified_base 4: mod_base = OTHER; note = cytidine-3'-phosphate
  modified_base 5: mod_base = OTHER; note = cytidine-3'-phosphate
  modified_base 6: mod_base = OTHER; note = cytidine-3'-phosphate
  modified_base 7: mod_base = OTHER; note = uridine-3'-phosphate
  modified_base 8: mod_base = OTHER; note = guanosine-3'-phosphate
  modified_base 9: mod_base = OTHER; note = adenosine-3'-phosphate
  modified_base 10: mod_base = OTHER; note = guanosine-3'-phosphate
  modified_base 11: mod_base = OTHER; note = cytidine-3'-phosphate
  modified_base 12: mod_base = OTHER; note = adenosine-3'-phosphate
  modified_base 13: mod_base = OTHER; note = adenosine-3'-phosphate
  modified_base 14: mod_base = OTHER; note = uridine-3'-phosphate
  modified_base 15: mod_base = OTHER; note = cytidine-3'-phosphate
  modified_base 16: mod_base = OTHER; note = adenosine-3'-phosphate
  modified_base 17: mod_base = OTHER; note = guanosine-3'-phosphate
  modified_base 18: mod_base = OTHER; note = guanosine-3'-phosphate
  modified_base 19: mod_base = OTHER; note = adenosine-3'-phosphate
  misc_feature 1..19: note = RNA
  misc_feature 20..21: note = DNA
agtccctgagcaatcaggatt

SEQ ID NO: 1669 - DNA, 21 bp, synthetic construct
  source 1..21: mol_type = other DNA
  modified_base 1: mod_base = OTHER; note = adenosine-3'-phosphate
  modified_base 2: mod_base = OTHER; note = guanosine-3'-phosphate
  modified_base 3: mod_base = OTHER; note = guanosine-3'-phosphate
  modified_base 4: mod_base = OTHER; note = guanosine-3'-phosphate
  modified_base 5: mod_base = OTHER; note = adenosine-3'-phosphate
  modified_base 6: mod_base = OTHER; note = adenosine-3'-phosphate
  modified_base 7: mod_base = OTHER; note = adenosine-3'-phosphate
  modified_base 8: mod_base = OTHER; note = guanosine-3'-phosphate
  modified_base 9: mod_base = OTHER; note = adenosine-3'-phosphate
  modified_base 10: mod_base = OTHER; note = uridine-3'-phosphate
  modified_base 11: mod_base = OTHER; note = guanosine-3'-phosphate
  modified_base 12: mod_base = OTHER; note = adenosine-3'-phosphate
  modified_base 13: mod_base = OTHER; note = guanosine-3'-phosphate
  modified_base 14: mod_base = OTHER; note = uridine-3'-phosphate
  modified_base 15: mod_base = OTHER; note = cytidine-3'-phosphate
  modified_base 16: mod_base = OTHER; note = cytidine-3'-phosphate
  modified_base 17: mod_base = OTHER; note = cytidine-3'-phosphate
  modified_base 18: mod_base = OTHER; note = uridine-3'-phosphate
  modified_base 19: mod_base = OTHER; note = guanosine-3'-phosphate
  misc_feature 1..19: note = RNA
  misc_feature 20..21: note = DNA
agggaaagatgagtccctgtt

SEQ ID NO: 1670 - DNA, 21 bp, synthetic construct
  source 1..21: mol_type = other DNA
  modified_base 1: mod_base = OTHER; note = uridine-3'-phosphate
  modified_base 2: mod_base = OTHER; note = adenosine-3'-phosphate
  modified_base 3: mod_base = OTHER; note = adenosine-3'-phosphate
  modified_base 4: mod_base = OTHER; note = uridine-3'-phosphate
  modified_base 5: mod_base = OTHER; note = cytidine-3'-phosphate
  modified_base 6: mod_base = OTHER; note = adenosine-3'-phosphate
  modified_base 7: mod_base = OTHER; note = cytidine-3'-phosphate
  modified_base 8: mod_base = OTHER; note = cytidine-3'-phosphate
  modified_base 9: mod_base = OTHER; note = adenosine-3'-phosphate
  modified_base 10: mod_base = OTHER; note = adenosine-3'-phosphate
  modified_base 11: mod_base = OTHER; note = guanosine-3'-phosphate
  modified_base 12: mod_base = OTHER; note = guanosine-3'-phosphate
  modified_base 13: mod_base = OTHER; note = adenosine-3'-phosphate
  modified_base 14: mod_base = OTHER; note = guanosine-3'-phosphate
  modified_base 15: mod_base = OTHER; note = guanosine-3'-phosphate
  modified_base 16: mod_base = OTHER; note = guanosine-3'-phosphate
  modified_base 17: mod_base = OTHER; note = adenosine-3'-phosphate
  modified_base 18: mod_base = OTHER; note = adenosine-3'-phosphate
  modified_base 19: mod_base = OTHER; note = adenosine-3'-phosphate
  misc_feature 1..19: note = RNA
  misc_feature 20..21: note = DNA
taatcaccaaggagggaaatt

SEQ ID NO: 1671 - DNA, 21 bp, synthetic construct
  source 1..21: mol_type = other DNA
  modified_base 1: mod_base = OTHER; note = uridine-3'-phosphate
  modified_base 2: mod_base = OTHER; note = cytidine-3'-phosphate
  modified_base 3: mod_base = OTHER; note = uridine-3'-phosphate
  modified_base 4: mod_base = OTHER; note = cytidine-3'-phosphate
  modified_base 5: mod_base = OTHER; note = adenosine-3'-phosphate
  modified_base 6: mod_base = OTHER; note = cytidine-3'-phosphate
  modified_base 7: mod_base = OTHER; note = uridine-3'-phosphate
  modified_base 8: mod_base = OTHER; note = guanosine-3'-phosphate
  modified_base 9: mod_base = OTHER; note = cytidine-3'-phosphate
  modified_base 10: mod_base = OTHER; note = guanosine-3'-phosphate
  modified_base 11: mod_base = OTHER; note = guanosine-3'-phosphate
  modified_base 12: mod_base = OTHER; note = adenosine-3'-phosphate
  modified_base 13: mod_base = OTHER; note = adenosine-3'-phosphate
  modified_base 14: mod_base = OTHER; note = uridine-3'-phosphate
  modified_base 15: mod_base = OTHER; note = cytidine-3'-phosphate
  modified_base 16: mod_base = OTHER; note = adenosine-3'-phosphate
  modified_base 17: mod_base = OTHER; note = cytidine-3'-phosphate
  modified_base 18: mod_base = OTHER; note = cytidine-3'-phosphate
  modified_base 19: mod_base = OTHER; note = adenosine-3'-phosphate
  misc_feature 1..19: note = RNA
  misc_feature 20..21: note = DNA
tctcactgcggaatcaccatt

SEQ ID NO: 1672 - DNA, 21 bp, synthetic construct
  source 1..21: mol_type = other DNA
  modified_base 1: mod_base = OTHER; note = uridine-3'-phosphate
  modified_base 2: mod_base = OTHER; note = cytidine-3'-phosphate
  modified_base 3: mod_base = OTHER; note = cytidine-3'-phosphate
  modified_base 4: mod_base = OTHER; note = cytidine-3'-phosphate
  modified_base 5: mod_base = OTHER; note = adenosine-3'-phosphate
  modified_base 6: mod_base = OTHER; note = guanosine-3'-phosphate
  modified_base 7: mod_base = OTHER; note = cytidine-3'-phosphate
  modified_base 8: mod_base = OTHER; note = cytidine-3'-phosphate
  modified_base 9: mod_base = OTHER; note = adenosine-3'-phosphate
  modified_base 10: mod_base = OTHER; note = cytidine-3'-phosphate
  modified_base 11: mod_base = OTHER; note = uridine-3'-phosphate
  modified_base 12: mod_base = OTHER; note = cytidine-3'-phosphate
  modified_base 13: mod_base = OTHER; note = uridine-3'-phosphate
  modified_base 14: mod_base = OTHER; note = cytidine-3'-phosphate
  modified_base 15: mod_base = OTHER; note = uridine-3'-phosphate
  modified_base 16: mod_base = OTHER; note = cytidine-3'-phosphate
  modified_base 17: mod_base = OTHER; note = adenosine-3'-phosphate
  modified_base 18: mod_base = OTHER; note = cytidine-3'-phosphate
  modified_base 19: mod_base = OTHER; note = uridine-3'-phosphate
  misc_feature 1..19: note = RNA
  misc_feature 20..21: note = DNA
tcccagccactctctcacttt

SEQ ID NO: 1673 - DNA, 21 bp, synthetic construct
  source 1..21: mol_type = other DNA
  modified_base 1: mod_base = OTHER; note = uridine-3'-phosphate
  modified_base 2: mod_base = OTHER; note = uridine-3'-phosphate
  modified_base 3: mod_base = OTHER; note = guanosine-3'-phosphate
  modified_base 4: mod_base = OTHER; note = cytidine-3'-phosphate
  modified_base 5: mod_base = OTHER; note = cytidine-3'-phosphate
  modified_base 6: mod_base = OTHER; note = uridine-3'-phosphate
  modified_base 7: mod_base = OTHER; note = uridine-3'-phosphate
  modified_base 8: mod_base = OTHER; note = cytidine-3'-phosphate
  modified_base 9: mod_base = OTHER; note = cytidine-3'-phosphate
  modified_base 10: mod_base = OTHER; note = adenosine-3'-phosphate
  modified_base 11: mod_base = OTHER; note = uridine-3'-phosphate
  modified_base 12: mod_base = OTHER; note = guanosine-3'-phosphate
  modified_base 13: mod_base = OTHER; note = cytidine-3'-phosphate
  modified_base 14: mod_base = OTHER; note = cytidine-3'-phosphate
  modified_base 15: mod_base = OTHER; note = cytidine-3'-phosphate
  modified_base 16: mod_base = OTHER; note = cytidine-3'-phosphate
  modified_base 17: mod_base = OTHER; note = adenosine-3'-phosphate
  modified_base 18: mod_base = OTHER; note = guanosine-3'-phosphate
  modified_base 19: mod_base = OTHER; note = cytidine-3'-phosphate
  misc_feature 1..19: note = RNA
  misc_feature 20..21: note = DNA
ttgccttccatgccccagctt

SEQ ID NO: 1674 - DNA, 21 bp, synthetic construct
  source 1..21: mol_type = other DNA
  modified_base 1: mod_base = OTHER; note = uridine-3'-phosphate
  modified_base 2: mod_base = OTHER; note = adenosine-3'-phosphate
  modified_base 3: mod_base = OTHER; note = cytidine-3'-phosphate
  modified_base 4: mod_base = OTHER; note = adenosine-3'-phosphate
  modified_base 5: mod_base = OTHER; note = cytidine-3'-phosphate
  modified_base 6: mod_base = OTHER; note = adenosine-3'-phosphate
  modified_base 7: mod_base = OTHER; note = adenosine-3'-phosphate
  modified_base 8: mod_base = OTHER; note = uridine-3'-phosphate
  modified_base 9: mod_base = OTHER; note = cytidine-3'-phosphate
  modified_base 10: mod_base = OTHER; note = uridine-3'-phosphate
  modified_base 11: mod_base = OTHER; note = uridine-3'-phosphate
  modified_base 12: mod_base = OTHER; note = guanosine-3'-phosphate
  modified_base 13: mod_base = OTHER; note = cytidine-3'-phosphate
  modified_base 14: mod_base = OTHER; note = cytidine-3'-phosphate
  modified_base 15: mod_base = OTHER; note = uridine-3'-phosphate
  modified_base 16: mod_base = OTHER; note = uridine-3'-phosphate
  modified_base 17: mod_base = OTHER; note = cytidine-3'-phosphate
  modified_base 18: mod_base = OTHER; note = cytidine-3'-phosphate
  modified_base 19: mod_base = OTHER; note = adenosine-3'-phosphate
  misc_feature 1..19: note = RNA
  misc_feature 20..21: note = DNA
tacacaatcttgccttccatt

SEQ ID NO: 1675 - DNA, 21 bp, synthetic construct
  source 1..21: mol_type = other DNA
  modified_base 1: mod_base = OTHER; note = uridine-3'-phosphate
  modified_base 2: mod_base = OTHER; note = uridine-3'-phosphate
  modified_base 3: mod_base = OTHER; note = guanosine-3'-phosphate
  modified_base 4: mod_base = OTHER; note = guanosine-3'-phosphate
  modified_base 5: mod_base = OTHER; note = guanosine-3'-phosphate
  modified_base 6: mod_base = OTHER; note = guanosine-3'-phosphate
  modified_base 7: mod_base = OTHER; note = guanosine-3'-phosphate
  modified_base 8: mod_base = OTHER; note = adenosine-3'-phosphate
  modified_base 9: mod_base = OTHER; note = adenosine-3'-phosphate
  modified_base 10: mod_base = OTHER; note = uridine-3'-phosphate
  modified_base 11: mod_base = OTHER; note = guanosine-3'-phosphate
  modified_base 12: mod_base = OTHER; note = guanosine-3'-phosphate
  modified_base 13: mod_base = OTHER; note = guanosine-3'-phosphate
  modified_base 14: mod_base = OTHER; note = adenosine-3'-phosphate
  modified_base 15: mod_base = OTHER; note = cytidine-3'-phosphate
  modified_base 16: mod_base = OTHER; note = adenosine-3'-phosphate
  modified_base 17: mod_base = OTHER; note = cytidine-3'-phosphate
  modified_base 18: mod_base = OTHER; note = adenosine-3'-phosphate
  modified_base 19: mod_base = OTHER; note = adenosine-3'-phosphate
  misc_feature 1..19: note = RNA
  misc_feature 20..21: note = DNA
ttgggggaatgggacacaatt

SEQ ID NO: 1676 - DNA, 21 bp, synthetic construct
  source 1..21: mol_type = other DNA
  modified_base 1: mod_base = OTHER; note = adenosine-3'-phosphate
  modified_base 2: mod_base = OTHER; note = guanosine-3'-phosphate
  modified_base 3: mod_base = OTHER; note = cytidine-3'-phosphate
  modified_base 4: mod_base = OTHER; note = uridine-3'-phosphate
  modified_base 5: mod_base = OTHER; note = guanosine-3'-phosphate
  modified_base 6: mod_base = OTHER; note = guanosine-3'-phosphate
  modified_base 7: mod_base = OTHER; note = cytidine-3'-phosphate
  modified_base 8: mod_base = OTHER; note = cytidine-3'-phosphate
  modified_base 9: mod_base = OTHER; note = guanosine-3'-phosphate
  modified_base 10: mod_base = OTHER; note = cytidine-3'-phosphate
  modified_base 11: mod_base = OTHER; note = adenosine-3'-phosphate
  modified_base 12: mod_base = OTHER; note = cytidine-3'-phosphate
  modified_base 13: mod_base = OTHER; note = uridine-3'-phosphate
  modified_base 14: mod_base = OTHER; note = guanosine-3'-phosphate
  modified_base 15: mod_base = OTHER; note = guanosine-3'-phosphate
  modified_base 16: mod_base = OTHER; note = guanosine-3'-phosphate
  modified_base 17: mod_base = OTHER; note = guanosine-3'-phosphate
  modified_base 18: mod_base = OTHER; note = guanosine-3'-phosphate
  modified_base 19: mod_base = OTHER; note = adenosine-3'-phosphate
  misc_feature 1..19: note = RNA
  misc_feature 20..21: note = DNA
agctggccgcactgggggatt

SEQ ID NO: 1677 - DNA, 21 bp, synthetic construct
  source 1..21: mol_type = other DNA
  modified_base 1: mod_base = OTHER; note = adenosine-3'-phosphate
  modified_base 2: mod_base = OTHER; note = uridine-3'-phosphate
  modified_base 3: mod_base = OTHER; note = cytidine-3'-phosphate
  modified_base 4: mod_base = OTHER; note = cytidine-3'-phosphate
  modified_base 5: mod_base = OTHER; note = uridine-3'-phosphate
  modified_base 6: mod_base = OTHER; note = guanosine-3'-phosphate
  modified_base 7: mod_base = OTHER; note = guanosine-3'-phosphate
  modified_base 8: mod_base = OTHER; note = cytidine-3'-phosphate
  modified_base 9: mod_base = OTHER; note = guanosine-3'-phosphate
  modified_base 10: mod_base = OTHER; note = cytidine-3'-phosphate
  modified_base 11: mod_base = OTHER; note = guanosine-3'-phosphate
  modified_base 12: mod_base = OTHER; note = guanosine-3'-phosphate
  modified_base 13: mod_base = OTHER; note = adenosine-3'-phosphate
  modified_base 14: mod_base = OTHER; note = guanosine-3'-phosphate
  modified_base 15: mod_base = OTHER; note = cytidine-3'-phosphate
  modified_base 16: mod_base = OTHER; note = uridine-3'-phosphate
  modified_base 17: mod_base = OTHER; note = guanosine-3'-phosphate
  modified_base 18: mod_base = OTHER; note = guanosine-3'-phosphate
  modified_base 19: mod_base = OTHER; note = cytidine-3'-phosphate
  misc_feature 1..19: note = RNA
  misc_feature 20..21: note = DNA
atcctggcgcggagctggctt

SEQ ID NO: 1678 - DNA, 21 bp, synthetic construct
  source 1..21: mol_type = other DNA
  modified_base 1: mod_base = OTHER; note = uridine-3'-phosphate
  modified_base 2: mod_base = OTHER; note = uridine-3'-phosphate
  modified_base 3: mod_base = OTHER; note = uridine-3'-phosphate
  modified_base 4: mod_base = OTHER; note = cytidine-3'-phosphate
  modified_base 5: mod_base = OTHER; note = cytidine-3'-phosphate
  modified_base 6: mod_base = OTHER; note = uridine-3'-phosphate
  modified_base 7: mod_base = OTHER; note = guanosine-3'-phosphate
  modified_base 8: mod_base = OTHER; note = cytidine-3'-phosphate
  modified_base 9: mod_base = OTHER; note = guanosine-3'-phosphate
  modified_base 10: mod_base = OTHER; note = cytidine-3'-phosphate
  modified_base 11: mod_base = OTHER; note = cytidine-3'-phosphate
  modified_base 12: mod_base = OTHER; note = adenosine-3'-phosphate
  modified_base 13: mod_base = OTHER; note = uridine-3'-phosphate
  modified_base 14: mod_base = OTHER; note = cytidine-3'-phosphate
  modified_base 15: mod_base = OTHER; note = cytidine-3'-phosphate
  modified_base 16: mod_base = OTHER; note = uridine-3'-phosphate
  modified_base 17: mod_base = OTHER; note = guanosine-3'-phosphate
  modified_base 18: mod_base = OTHER; note = guanosine-3'-phosphate
  modified_base 19: mod_base = OTHER; note = cytidine-3'-phosphate
  misc_feature 1..19: note = RNA
  misc_feature 20..21: note = DNA
tttcctgcgccatcctggctt

SEQ ID NO: 1679 - DNA, 21 bp, synthetic construct
  source 1..21: mol_type = other DNA
  modified_base 1: mod_base = OTHER; note = uridine-3'-phosphate
  modified_base 2: mod_base = OTHER; note = adenosine-3'-phosphate
  modified_base 3: mod_base = OTHER; note = cytidine-3'-phosphate
  modified_base 4: mod_base = OTHER; note = uridine-3'-phosphate
  modified_base 5: mod_base = OTHER; note = uridine-3'-phosphate
  modified_base 6: mod_base = OTHER; note = uridine-3'-phosphate
  modified_base 7: mod_base = OTHER; note = adenosine-3'-phosphate
  modified_base 8: mod_base = OTHER; note = uridine-3'-phosphate
  modified_base 9: mod_base = OTHER; note = uridine-3'-phosphate
  modified_base 10: mod_base = OTHER; note = guanosine-3'-phosphate
  modified_base 11: mod_base = OTHER; note = adenosine-3'-phosphate
  modified_base 12: mod_base = OTHER; note = guanosine-3'-phosphate
  modified_base 13: mod_base = OTHER; note = uridine-3'-phosphate
  modified_base 14: mod_base = OTHER; note = uridine-3'-phosphate
  modified_base 15: mod_base = OTHER; note = cytidine-3'-phosphate
  modified_base 16: mod_base = OTHER; note = cytidine-3'-phosphate
  modified_base 17: mod_base = OTHER; note = uridine-3'-phosphate
  modified_base 18: mod_base = OTHER; note = guanosine-3'-phosphate
  modified_base 19: mod_base = OTHER; note = cytidine-3'-phosphate
  misc_feature 1..19: note = RNA
  misc_feature 20..21: note = DNA
tactttattgagttcctgctt

SEQ ID NO: 1680 - DNA, 21 bp, synthetic construct
  source 1..21: mol_type = other DNA
  modified_base 1: mod_base = OTHER; note = adenosine-3'-phosphate
  modified_base 2: mod_base = OTHER; note = uridine-3'-phosphate
  modified_base 3: mod_base = OTHER; note = uridine-3'-phosphate
  modified_base 4: mod_base = OTHER; note = uridine-3'-phosphate
  modified_base 5: mod_base = OTHER; note = uridine-3'-phosphate
  modified_base 6: mod_base = OTHER; note = cytidine-3'-phosphate
  modified_base 7: mod_base = OTHER; note = adenosine-3'-phosphate
  modified_base 8: mod_base = OTHER; note = adenosine-3'-phosphate
  modified_base 9: mod_base = OTHER; note = adenosine-3'-phosphate
  modified_base 10: mod_base = OTHER; note = guanosine-3'-phosphate
  modified_base 11: mod_base = OTHER; note = cytidine-3'-phosphate
  modified_base 12: mod_base = OTHER; note = adenosine-3'-phosphate
  modified_base 13: mod_base = OTHER; note = cytidine-3'-phosphate
  modified_base 14: mod_base = OTHER; note = uridine-3'-phosphate
  modified_base 15: mod_base = OTHER; note = uridine-3'-phosphate
  modified_base 16: mod_base = OTHER; note = uridine-3'-phosphate
  modified_base 17: mod_base = OTHER; note = adenosine-3'-phosphate
  modified_base 18: mod_base = OTHER; note = uridine-3'-phosphate
  modified_base 19: mod_base = OTHER; note = uridine-3'-phosphate
  misc_feature 1..19: note = RNA
  misc_feature 20..21: note = DNA
attttcaaagcactttatttt

SEQ ID NO: 1681 - DNA, 21 bp, synthetic construct
  source 1..21: mol_type = other DNA
  modified_base 1: mod_base = OTHER; note = uridine-3'-phosphate
  modified_base 2: mod_base = OTHER; note = uridine-3'-phosphate
  modified_base 3: mod_base = OTHER; note = uridine-3'-phosphate
  modified_base 4: mod_base = OTHER; note = uridine-3'-phosphate
  modified_base 5: mod_base = OTHER; note = uridine-3'-phosphate
  modified_base 6: mod_base = OTHER; note = cytidine-3'-phosphate
  modified_base 7: mod_base = OTHER; note = uridine-3'-phosphate
  modified_base 8: mod_base = OTHER; note = cytidine-3'-phosphate
  modified_base 9: mod_base = OTHER; note = adenosine-3'-phosphate
  modified_base 10: mod_base = OTHER; note = guanosine-3'-phosphate
  modified_base 11: mod_base = OTHER; note = cytidine-3'-phosphate
  modified_base 12: mod_base = OTHER; note = adenosine-3'-phosphate
  modified_base 13: mod_base = OTHER; note = uridine-3'-phosphate
  modified_base 14: mod_base = OTHER; note = uridine-3'-phosphate
  modified_base 15: mod_base = OTHER; note = uridine-3'-phosphate
  modified_base 16: mod_base = OTHER; note = uridine-3'-phosphate
  modified_base 17: mod_base = OTHER; note = cytidine-3'-phosphate
  modified_base 18: mod_base = OTHER; note = adenosine-3'-phosphate
  modified_base 19: mod_base = OTHER; note = adenosine-3'-phosphate
  misc_feature 1..19: note = RNA
  misc_feature 20..21: note = DNA
tttttctcagcattttcaatt

SEQ ID NO: 1682 - RNA, 19 nt, synthetic construct
  source 1..19: mol_type = other RNA
gactcctggataggcagct

SEQ ID NO: 1683 - RNA, 19 nt, synthetic construct
  source 1..19: mol_type = other RNA
taggcagctggaccaacgg

SEQ ID NO: 1684 - RNA, 19 nt, synthetic construct
  source 1..19: mol_type = other RNA
accaacggacggatgccat

SEQ ID NO: 1685 - RNA, 19 nt, synthetic construct
  source 1..19: mol_type = other RNA
atgccatgagggctctgct

SEQ ID NO: 1686 - RNA, 19 nt, synthetic construct
  source 1..19: mol_type = other RNA
gctctgctgctcctggggt

SEQ ID NO: 1687 - RNA, 19 nt, synthetic construct
  source 1..19: mol_type = other RNA
tcctggggttcctgctggt

SEQ ID NO: 1688 - RNA, 19 nt, synthetic construct
  source 1..19: mol_type = other RNA
ctgctggtgagcttggagt

SEQ ID NO: 1689 - RNA, 19 nt, synthetic construct
  source 1..19: mol_type = other RNA
cttggagtcaacactttcg

SEQ ID NO: 1690 - RNA, 19 nt, synthetic construct
  source 1..19: mol_type = other RNA
actttcgattccaccttgg

SEQ ID NO: 1691 - RNA, 19 nt, synthetic construct
  source 1..19: mol_type = other RNA
ccaccttgggaagccccca

SEQ ID NO: 1692 - RNA, 19 nt, synthetic construct
  source 1..19: mol_type = other RNA
gcccccaaggagcataagt

SEQ ID NO: 1693 - RNA, 19 nt, synthetic construct
  source 1..19: mol_type = other RNA
cataagtacaaagctgaag

SEQ ID NO: 1694 - RNA, 19 nt, synthetic construct
  source 1..19: mol_type = other RNA
aagctgaagagcacacagt

SEQ ID NO: 1695 - RNA, 19 nt, synthetic construct
  source 1..19: mol_type = other RNA
acacagtcgttctcactgt

SEQ ID NO: 1696 - RNA, 19 nt, synthetic construct
  source 1..19: mol_type = other RNA
ttctcactgtcaccgggga

SEQ ID NO: 1697 - RNA, 19 nt, synthetic construct
  source 1..19: mol_type = other RNA
accggggagccctgccact

SEQ ID NO: 1698 - RNA, 19 nt, synthetic construct
  source 1..19: mol_type = other RNA
tgccacttccccttccagt

SEQ ID NO: 1699 - RNA, 19 nt, synthetic construct
  source 1..19: mol_type = other RNA
ttccagtaccaccggcagc

SEQ ID NO: 1700 - RNA, 19 nt, synthetic construct
  source 1..19: mol_type = other RNA
accggcagctgtaccacaa

SEQ ID NO: 1701 - RNA, 19 nt, synthetic construct
  source 1..19: mol_type = other RNA
taccacaaatgtacccaca

SEQ ID NO: 1702 - RNA, 19 nt, synthetic construct
  source 1..19: mol_type = other RNA
tacccacaagggccggcca

SEQ ID NO: 1703 - RNA, 19 nt, synthetic construct
  source 1..19: mol_type = other RNA
gccggccaggccctcagcc

SEQ ID NO: 1704 - RNA, 19 nt, synthetic construct
  source 1..19: mol_type = other RNA
ctcagccctggtgtgctac

SEQ ID NO: 1705 - RNA, 19 nt, synthetic construct
  source 1..19: mol_type = other RNA
tgtgctaccacccccaact

SEQ ID NO: 1706 - RNA, 19 nt, synthetic construct
  source 1..19: mol_type = other RNA
acccccaactttgatcagg

SEQ ID NO: 1707 - RNA, 19 nt, synthetic construct
  source 1..19: mol_type = other RNA
atcaggaccagcgatgggg

SEQ ID NO: 1708 - RNA, 19 nt, synthetic construct
  source 1..19: mol_type = other RNA
agcgatggggatactgttt

SEQ ID NO: 1709 - RNA, 19 nt, synthetic construct
  source 1..19: mol_type = other RNA
tactgtttggagcccaaga

SEQ ID NO: 1710 - RNA, 19 nt, synthetic construct
  source 1..19: mol_type = other RNA
ccaagaaagtgaaagacca

SEQ ID NO: 1711 - RNA, 19 nt, synthetic construct
  source 1..19: mol_type = other RNA
aaagaccactgcagcaaac

SEQ ID NO: 1712 - RNA, 19 nt, synthetic construct
  source 1..19: mol_type = other RNA
tgcagcaaacacagcccct

SEQ ID NO: 1713 - RNA, 19 nt, synthetic construct
  source 1..19: mol_type = other RNA
agcccctgccagaaaggag

SEQ ID NO: 1714 - RNA, 19 nt, synthetic construct
  source 1..19: mol_type = other RNA
agaaaggagggacctgtgt

SEQ ID NO: 1715 - RNA, 19 nt, synthetic construct
  source 1..19: mol_type = other RNA
acctgtgtgaacatgccaa

SEQ ID NO: 1716 - RNA, 19 nt, synthetic construct
  source 1..19: mol_type = other RNA
atgccaagcggcccccact

SEQ ID NO: 1717 - RNA, 19 nt, synthetic construct
  source 1..19: mol_type = other RNA
gcccccactgtctctgtcc

SEQ ID NO: 1718 - RNA, 19 nt, synthetic construct
  source 1..19: mol_type = other RNA
cacctcactggaaaccact

SEQ ID NO: 1719 - RNA, 19 nt, synthetic construct
  source 1..19: mol_type = other RNA
aaccactgccagaaagaga

SEQ ID NO: 1720 - RNA, 19 nt, synthetic construct
  source 1..19: mol_type = other RNA
cagaaagagaagtgctttg

SEQ ID NO: 1721 - RNA, 19 nt, synthetic construct
  source 1..19: mol_type = other RNA
tgctttgagcctcagcttc

SEQ ID NO: 1722 - RNA, 19 nt, synthetic construct
  source 1..19: mol_type = other RNA
cagcttctccggtttttcc

SEQ ID NO: 1723 - RNA, 19 nt, synthetic construct
  source 1..19: mol_type = other RNA
cggtttttccacaagaatg

SEQ ID NO: 1724 - RNA, 19 nt, synthetic construct
  source 1..19: mol_type = other RNA
caagaatgagatatggtat

SEQ ID NO: 1725 - RNA, 19 nt, synthetic construct
  source 1..19: mol_type = other RNA
tatggtatagaactgagca

SEQ ID NO: 1726 - RNA, 19 nt, synthetic construct
  source 1..19: mol_type = other RNA
tgagcaagcagctgtggcc

SEQ ID NO: 1727 - RNA, 19 nt, synthetic construct
  source 1..19: mol_type = other RNA
gctgtggccagatgccagt

SEQ ID NO: 1728 - RNA, 19 nt, synthetic construct
  source 1..19: mol_type = other RNA
atgccagtgcaagggtcct

SEQ ID NO: 1729 - RNA, 19 nt, synthetic construct
  source 1..19: mol_type = other RNA
aagggtcctgatgcccact

SEQ ID NO: 1730 - RNA, 19 nt, synthetic construct
  source 1..19: mol_type = other RNA
tgcccactgccagcggctg

SEQ ID NO: 1731 - RNA, 19 nt, synthetic construct
  source 1..19: mol_type = other RNA
cggctggccagccaggcct

SEQ ID NO: 1732 - RNA, 19 nt, synthetic construct
  source 1..19: mol_type = other RNA
agccaggcctgccgcacca

SEQ ID NO: 1733 - RNA, 19 nt, synthetic construct
  source 1..19: mol_type = other RNA
cgcaccaacccgtgcctcc

SEQ ID NO: 1734 - RNA, 19 nt, synthetic construct
  source 1..19: mol_type = other RNA
tgcctccatgggggtcgct

SEQ ID NO: 1735 - RNA, 19 nt, synthetic construct
  source 1..19: mol_type = other RNA
ggggtcgctgcctagaggt

SEQ ID NO: 1736 - RNA, 19 nt, synthetic construct
  source 1..19: mol_type = other RNA
ctagaggtggagggccacc

SEQ ID NO: 1737 - RNA, 19 nt, synthetic construct
  source 1..19: mol_type = other RNA
agggccaccgcctgtgcca

SEQ ID NO: 1738 - RNA, 19 nt, synthetic construct
  source 1..19: mol_type = other RNA
tgtgccactgcccggtggg

SEQ ID NO: 1739 - RNA, 19 nt, synthetic construct
  source 1..19: mol_type = other RNA
cggtgggctacaccggagc

SEQ ID NO: 1740 - RNA, 19 nt, synthetic construct
  source 1..19: mol_type = other RNA
accggagccttctgcgacg

SEQ ID NO: 1741 - RNA, 19 nt, synthetic construct
  source 1..19: mol_type = other RNA
ttctgcgacgtggacacca

SEQ ID NO: 1742 - RNA, 19 nt, synthetic construct
  source 1..19: mol_type = other RNA
gacaccaaggcaagctgct

SEQ ID NO: 1743 - RNA, 19 nt, synthetic construct
  source 1..19: mol_type = other RNA
caagctgctatgatggccg

SEQ ID NO: 1744 - RNA, 19 nt, synthetic construct
  source 1..19: mol_type = other RNA
gatggccgcgggctcagct

SEQ ID NO: 1745 - RNA, 19 nt, synthetic construct
  source 1..19: mol_type = other RNA
tcagctaccgcggcctggc

SEQ ID NO: 1746 - RNA, 19 nt, synthetic construct
  source 1..19: mol_type = other RNA
cggcctggccaggaccacg

SEQ ID NO: 1747 - RNA, 19 nt, synthetic construct
  source 1..19: mol_type = other RNA
aggaccacgctctcgggtg

SEQ ID NO: 1748 - RNA, 19 nt, synthetic construct
  source 1..19: mol_type = other RNA
tcgggtgcgccctgtcagc

SEQ ID NO: 1749 - RNA, 19 nt, synthetic construct
  source 1..19: mol_type = other RNA
ctgtcagccgtgggcctcg

SEQ ID NO: 1750 - RNA, 19 nt, synthetic construct
  source 1..19: mol_type = other RNA
tgggcctcggaggccacct

SEQ ID NO: 1751 - RNA, 19 nt, synthetic construct
  source 1..19: mol_type = other RNA
ccacctaccggaacgtgac

SEQ ID NO: 1752 - RNA, 19 nt, synthetic construct
  source 1..19: mol_type = other RNA
aacgtgactgccgagcaag

SEQ ID NO: 1753 - RNA, 19 nt, synthetic construct
  source 1..19: mol_type = other RNA
cgagcaagcgcggaactgg

SEQ ID NO: 1754 - RNA, 19 nt, synthetic construct
  source 1..19: mol_type = other RNA
cggaactggggactgggcg

SEQ ID NO: 1755 - RNA, 19 nt, synthetic construct
  source 1..19: mol_type = other RNA
gactgggcggccacgcctt

SEQ ID NO: 1756 - RNA, 19 nt, synthetic construct
  source 1..19: mol_type = other RNA
acgccttctgccggaaccc

SEQ ID NO: 1757 - RNA, 19 nt, synthetic construct
  source 1..19: mol_type = other RNA
cggaacccggacaacgaca

SEQ ID NO: 1758 - RNA, 19 nt, synthetic construct
  source 1..19: mol_type = other RNA
aacgacatccgcccgtggt

SEQ ID NO: 1759 - RNA, 19 nt, synthetic construct
  source 1..19: mol_type = other RNA
gcccgtggtgcttcgtgct

SEQ ID NO: 1760 - RNA, 19 nt, synthetic construct
  source 1..19: mol_type = other RNA
ttcgtgctgaaccgcgacc

SEQ ID NO: 1761 - RNA, 19 nt, synthetic construct
  source 1..19: mol_type = other RNA
accgcgaccggctgagctg

SEQ ID NO: 1762 - RNA, 19 nt, synthetic construct
  source 1..19: mol_type = other RNA
ctgagctgggagtactgcg

SEQ ID NO: 1763 - RNA, 19 nt, synthetic construct
  source 1..19: mol_type = other RNA
tactgcgacctggcacagt

SEQ ID NO: 1764 - RNA, 19 nt, synthetic construct
  source 1..19: mol_type = other RNA
tggcacagtgccagacccc

SEQ ID NO: 1765 - RNA, 19 nt, synthetic construct
  source 1..19: mol_type = other RNA
agaccccaacccaggcggc

SEQ ID NO: 1766 - RNA, 19 nt, synthetic construct
  source 1..19: mol_type = other RNA
aggcggcgcctccgacccc

SEQ ID NO: 1767 - RNA, 19 nt, synthetic construct
  source 1..19: mol_type = other RNA
tccgaccccggtgtcccct

SEQ ID NO: 1768 - RNA, 19 nt, synthetic construct
  source 1..19: mol_type = other RNA
tgtcccctaggcttcatgt

SEQ ID NO: 1769 - RNA, 19 nt, synthetic construct
  source 1..19: mol_type = other RNA
ttcatgtcccactcatgcc

SEQ ID NO: 1770 - RNA, 19 nt, synthetic construct
  source 1..19: mol_type = other RNA
actcatgcccgcgcagccg

SEQ ID NO: 1771 - RNA, 19 nt, synthetic construct
  source 1..19: mol_type = other RNA
cgcagccggcaccgccgaa

SEQ ID NO: 1772 - RNA, 19 nt, synthetic construct
  source 1..19: mol_type = other RNA
accgccgaagcctcagccc

SEQ ID NO: 1773 - RNA, 19 nt, synthetic construct
  source 1..19: mol_type = other RNA
tcagcccacgacccggacc

SEQ ID NO: 1774 - RNA, 19 nt, synthetic construct
  source 1..19: mol_type = other RNA
acccggaccccgcctcagt

SEQ ID NO: 1775 - RNA, 19 nt, synthetic construct
  source 1..19: mol_type = other RNA
cctcagtcccagaccccgg

SEQ ID NO: 1776 - RNA, 19 nt, synthetic construct
  source 1..19: mol_type = other RNA
agaccccgggagccttgcc

SEQ ID NO: 1777 - RNA, 19 nt, synthetic construct
  source 1..19: mol_type = other RNA
ccttgccggcgaagcggga

SEQ ID NO: 1778 - RNA, 19 nt, synthetic construct
  source 1..19: mol_type = other RNA
aagcgggagcagccgcctt

SEQ ID NO: 1779 - RNA, 19 nt, synthetic construct
  source 1..19: mol_type = other RNA
agccgccttccctgaccag

SEQ ID NO: 1780 - RNA, 19 nt, synthetic construct
  source 1..19: mol_type = other RNA
tgaccaggaacggcccact

SEQ ID NO: 1781 - RNA, 19 nt, synthetic construct
  source 1..19: mol_type = other RNA
cggcccactgagctgcggg

SEQ ID NO: 1782 - RNA, 19 nt, synthetic construct
  source 1..19: mol_type = other RNA
tgcgggcagcggctccgca

SEQ ID NO: 1783 - RNA, 19 nt, synthetic construct
  source 1..19: mol_type = other RNA
cggctccgcaagagtctgt

SEQ ID NO: 1784 - RNA, 19 nt, synthetic construct
  source 1..19: mol_type = other RNA
agtctgtcttcgatgaccc

SEQ ID NO: 1785 - RNA, 19 nt, synthetic construct
  source 1..19: mol_type = other RNA
cgatgacccgcgtcgttgg

SEQ ID NO: 1786 - RNA, 19 nt, synthetic construct
  source 1..19: mol_type = other RNA
tcgttggcgggctggtggc

SEQ ID NO: 1787 - RNA, 19 nt, synthetic construct
  source 1..19: mol_type = other RNA
tggtggcgctacgcggggc

SEQ ID NO: 1788 - RNA, 19 nt, synthetic construct
  source 1..19: mol_type = other RNA
tacgcggggcgcaccccta

SEQ ID NO: 1789 - RNA, 19 nt, synthetic construct
  source 1..19: mol_type = other RNA
acccctacatcgccgcgct

SEQ ID NO: 1790 - RNA, 19 nt, synthetic construct
  source 1..19: mol_type = other RNA
gccgcgctgtactggggcc

SEQ ID NO: 1791 - RNA, 19 nt, synthetic construct
  source 1..19: mol_type = other RNA
ctggggccacagtttctgc

SEQ ID NO: 1792 - RNA, 19 nt, synthetic construct
  source 1..19: mol_type = other RNA
tttctgcgccggcagcctc

SEQ ID NO: 1793 - RNA, 19 nt, synthetic construct
  source 1..19: mol_type = other RNA
cggcagcctcatcgccccc

SEQ ID NO: 1794 - RNA, 19 nt, synthetic construct
  source 1..19: mol_type = other RNA
tcgccccctgctgggtgct

SEQ ID NO: 1795 - RNA, 19 nt, synthetic construct
  source 1..19: mol_type = other RNA
tgggtgctgacggccgctc

SEQ ID NO: 1796 - RNA, 19 nt, synthetic construct
  source 1..19: mol_type = other RNA
gccgctcactgcctgcagg

SEQ ID NO: 1797 - RNA, 19 nt, synthetic construct
  source 1..19: mol_type = other RNA
ctgcaggaccggcccgcac

SEQ ID NO: 1798 - RNA, 19 nt, synthetic construct
  source 1..19: mol_type = other RNA
ggcccgcacccgaggatct

SEQ ID NO: 1799 - RNA, 19 nt, synthetic construct
  source 1..19: mol_type = other RNA
cgaggatctgacggtggtg

SEQ ID NO: 1800 - RNA, 19 nt, synthetic construct
  source 1..19: mol_type = other RNA
gtggtgctcggccaggaac

SEQ ID NO: 1801 - RNA, 19 nt, synthetic construct
  source 1..19: mol_type = other RNA
gccaggaacgccgtaacca

SEQ ID NO: 1802 - RNA, 19 nt, synthetic construct
  source 1..19: mol_type = other RNA
cgtaaccacagctgtgagc

SEQ ID NO: 1803 - RNA, 19 nt, synthetic construct
  source 1..19: mol_type = other RNA
tgtgagccgtgccagacgt

SEQ ID NO: 1804 - RNA, 19 nt, synthetic construct
  source 1..19: mol_type = other RNA
tgccagacgttggccgtgc

SEQ ID NO: 1805 - RNA, 19 nt, synthetic construct
  source 1..19: mol_type = other RNA
gccgtgcgctcctaccgct

SEQ ID NO: 1806 - RNA, 19 nt, synthetic construct
  source 1..19: mol_type = other RNA
taccgcttgcacgaggcct

SEQ ID NO: 1807 - RNA, 19 nt, synthetic construct
  source 1..19: mol_type = other RNA
acgaggccttctcgcccgt

SEQ ID NO: 1808 - RNA, 19 nt, synthetic construct
  source 1..19: mol_type = other RNA
tcgcccgtcagctaccagc

SEQ ID NO: 1809 - RNA, 19 nt, synthetic construct
  source 1..19: mol_type = other RNA
ctaccagcacgacctggct

SEQ ID NO: 1810 - RNA, 19 nt, synthetic construct
  source 1..19: mol_type = other RNA
acctggctctgttgcgcct

SEQ ID NO: 1811 - RNA, 19 nt, synthetic construct
  source 1..19: mol_type = other RNA
ttgcgccttcaggaggatg

SEQ ID NO: 1812 - RNA, 19 nt, synthetic construct
  source 1..19: mol_type = other RNA
gaggatgcggacggcagct

SEQ ID NO: 1813 - RNA, 19 nt, synthetic construct
  source 1..19: mol_type = other RNA
acggcagctgcgcgctcct

SEQ ID NO: 1814 - RNA, 19 nt, synthetic construct
  source 1..19: mol_type = other RNA
cgctcctgtcgccttacgt

SEQ ID NO: 1815 - RNA, 19 nt, synthetic construct
  source 1..19: mol_type = other RNA
ccttacgttcagccggtgt

SEQ ID NO: 1816 - RNA, 19 nt, synthetic construct
  source 1..19: mol_type = other RNA
agccggtgtgcctgccaag

SEQ ID NO: 1817 - RNA, 19 nt, synthetic construct
  source 1..19: mol_type = other RNA
tgccaagcggcgccgcgcg

SEQ ID NO: 1818 - RNA, 19 nt, synthetic construct
  source 1..19: mol_type = other RNA
gcgccgcgcgaccctccga

SEQ ID NO: 1819 - RNA, 19 nt, synthetic construct
  source 1..19: mol_type = other RNA
ccctccgagaccacgctct

SEQ ID NO: 1820 - RNA, 19 nt, synthetic construct
  source 1..19: mol_type = other RNA
cgctctgccaggtggccgg

SEQ ID NO: 1821 - RNA, 19 nt, synthetic construct
  source 1..19: mol_type = other RNA
aggtggccggctggggcca

SEQ ID NO: 1822 - RNA, 19 nt, synthetic construct
  source 1..19: mol_type = other RNA
tggggccaccagttcgagg

SEQ ID NO: 1823 - RNA, 19 nt, synthetic construct
  source 1..19: mol_type = other RNA
ttcgagggggcggaggaat

SEQ ID NO: 1824 - RNA, 19 nt, synthetic construct
  source 1..19: mol_type = other RNA
cggaggaatatgccagctt

SEQ ID NO: 1825 - RNA, 19 nt, synthetic construct
  source 1..19: mol_type = other RNA
cagcttcctgcaggaggcg

SEQ ID NO: 1826 - RNA, 19 nt, synthetic construct
  source 1..19: mol_type = other RNA
aggaggcgcaggtaccgtt

SEQ ID NO: 1827 - RNA, 19 nt, synthetic construct
  source 1..19: mol_type = other RNA
aggtaccgttcctctccct

SEQ ID NO: 1828 - RNA, 19 nt, synthetic construct
  source 1..19: mol_type = other RNA
ctctccctggagcgctgct

SEQ ID NO: 1829 - RNA, 19 nt, synthetic construct
  source 1..19: mol_type = other RNA
cgctgctcagccccggacg

SEQ ID NO: 1830 - RNA, 19 nt, synthetic construct
  source 1..19: mol_type = other RNA
ccggacgtgcacggatcct

SEQ ID NO: 1831 - RNA, 19 nt, synthetic construct
  source 1..19: mol_type = other RNA
cggatcctccatcctcccc

SEQ ID NO: 1832 - RNA, 19 nt, synthetic construct
  source 1..19: mol_type = other RNA
catcctccccggcatgctc

SEQ ID NO: 1833 - RNA, 19 nt, synthetic construct
  source 1..19: mol_type = other RNA
catgctctgcgcagggttc

SEQ ID NO: 1834 - RNA, 19 nt, synthetic construct
  source 1..19: mol_type = other RNA
agggttcctcgagggcggc

SEQ ID NO: 1835 - RNA, 19 nt, synthetic construct
  source 1..19: mol_type = other RNA
gagggcggcaccgatgcgt

SEQ ID NO: 1836 - RNA, 19 nt, synthetic construct
  source 1..19: mol_type = other RNA
gatgcgtgccagggtgatt

SEQ ID NO: 1837 - RNA, 19 nt, synthetic construct
  source 1..19: mol_type = other RNA
agggtgattccggaggccc

SEQ ID NO: 1838 - RNA, 19 nt, synthetic construct
  source 1..19: mol_type = other RNA
cggaggcccgctggtgtgt

SEQ ID NO: 1839 - RNA, 19 nt, synthetic construct
  source 1..19: mol_type = other RNA
ggtgtgtgaggaccaagct

SEQ ID NO: 1840 - RNA, 19 nt, synthetic construct
  source 1..19: mol_type = other RNA
ccaagctgcagagcgccgg

SEQ ID NO: 1841 - RNA, 19 nt, synthetic construct
  source 1..19: mol_type = other RNA
agagcgccggctcaccctg

SEQ ID NO: 1842 - RNA, 19 nt, synthetic construct
  source 1..19: mol_type = other RNA
tcaccctgcaaggcatcat

SEQ ID NO: 1843 - RNA, 19 nt, synthetic construct
  source 1..19: mol_type = other RNA
ggcatcatcagctggggat

SEQ ID NO: 1844 - RNA, 19 nt, synthetic construct
  source 1..19: mol_type = other RNA
ctggggatcgggctgtggt

SEQ ID NO: 1845 - RNA, 19 nt, synthetic construct
  source 1..19: mol_type = other RNA
tgtggtgaccgcaacaagc

SEQ ID NO: 1846 - RNA, 19 nt, synthetic construct
  source 1..19: mol_type = other RNA
caacaagccaggcgtctac

SEQ ID NO: 1847 - RNA, 19 nt, synthetic construct
  source 1..19: mol_type = other RNA
aggcgtctacaccgatgtg

SEQ ID NO: 1848 - RNA, 19 nt, synthetic construct
  source 1..19: mol_type = other RNA
gatgtggcctactacctgg

SEQ ID NO: 1849 - RNA, 19 nt, synthetic construct
  source 1..19: mol_type = other RNA
tactacctggcctggatcc

SEQ ID NO: 1850 - RNA, 19 nt, synthetic construct
  source 1..19: mol_type = other RNA
ctggatccgggagcacacc

SEQ ID NO: 1851 - RNA, 19 nt, synthetic construct
  source 1..19: mol_type = other RNA
agcacaccgtttcctgatt

SEQ ID NO: 1852 - RNA, 19 nt, synthetic construct
  source 1..19: mol_type = other RNA
tcctgattgctcagggact

SEQ ID NO: 1853 - RNA, 19 nt, synthetic construct
  source 1..19: mol_type = other RNA
cagggactcatctttccct

SEQ ID NO: 1854 - RNA, 19 nt, synthetic construct
  source 1..19: mol_type = other RNA
tttccctccttggtgattc

SEQ ID NO: 1855 - RNA, 19 nt, synthetic construct
  source 1..19: mol_type = other RNA
tggtgattccgcagtgaga

SEQ ID NO: 1856 - RNA, 19 nt, synthetic construct
  source 1..19: mol_type = other RNA
agtgagagagtggctgggg

SEQ ID NO: 1857 - RNA, 19 nt, synthetic construct
  source 1..19: mol_type = other RNA
gctggggcatggaaggcaa

SEQ ID NO: 1858 - RNA, 19 nt, synthetic construct
  source 1..19: mol_type = other RNA
tggaaggcaagattgtgtc

SEQ ID NO: 1859 - RNA, 19 nt, synthetic construct
  source 1..19: mol_type = other RNA
ttgtgtcccattcccccag

SEQ ID NO: 1860 - RNA, 19 nt, synthetic construct
  source 1..19: mol_type = other RNA
tcccccagtgcggccagct

SEQ ID NO: 1861 - RNA, 19 nt, synthetic construct
  source 1..19: mol_type = other RNA
gccagctccgcgccaggat

SEQ ID NO: 1862 - RNA, 19 nt, synthetic construct
  source 1..19: mol_type = other RNA
gccaggatggcgcaggaac

SEQ ID NO: 1863 - RNA, 19 nt, synthetic construct
  source 1..19: mol_type = other RNA
gcaggaactcaataaagtg

SEQ ID NO: 1864 - RNA, 19 nt, synthetic construct
  source 1..19: mol_type = other RNA
aataaagtgctttgaaaat

SEQ ID NO: 1865 - RNA, 19 nt, synthetic construct
  source 1..19: mol_type = other RNA
ttgaaaatgctgagaaaaa

SEQ ID NO: 1866 - RNA, 21 nt, synthetic construct
  source 1..21: mol_type = other RNA
  modified_base 1: mod_base = OTHER; note = 2'-O-methyladenosine-3'-phosphorothioate
  modified_base 2: mod_base = OTHER; note = 2'-O-methyladenosine-3'-phosphorothioate
  modified_base 3: mod_base = OTHER; note = 2'-O-methylcytidine-3'-phosphate
  modified_base 4: mod_base = OTHER; note = 2'-O-methyluridine-3'-phosphate
  modified_base 5: mod_base = OTHER; note = 2'-O-methylcytidine-3'-phosphate
  modified_base 6: mod_base = OTHER; note = 2'-O-methyladenosine-3'-phosphate
  modified_base 7: mod_base = OTHER; note = 2'-deoxy-2'-fluoroadenosine-3'-phosphate
  modified_base 8: mod_base = OTHER; note = 2'-O-methyluridine-3'-phosphate
  modified_base 9: mod_base = OTHER; note = 2'-deoxy-2'-fluoroadenosine-3'-phosphate
  modified_base 10: mod_base = OTHER; note = 2'-deoxy-2'-fluoroadenosine-3'-phosphate
  modified_base 11: mod_base = OTHER; note = 2'-deoxy-2'-fluoroadenosine-3'-phosphate
  modified_base 12: mod_base = OTHER; note = 2'-O-methylguanosine-3'-phosphate
  modified_base 13: mod_base = OTHER; note = 2'-O-methyluridine-3'-phosphate
  modified_base 14: mod_base = OTHER; note = 2'-O-methylguanosine-3'-phosphate
  modified_base 15: mod_base = OTHER; note = 2'-O-methylcytidine-3'-phosphate
  modified_base 16: mod_base = OTHER; note = 2'-O-methyluridine-3'-phosphate
  modified_base 17: mod_base = OTHER; note = 2'-O-methyluridine-3'-phosphate
  modified_base 18: mod_base = OTHER; note = 2'-O-methyluridine-3'-phosphate
  modified_base 19: mod_base = OTHER; note = 2'-O-methylguanosine-3'-phosphate
  modified_base 20: mod_base = OTHER; note = 2'-O-methyladenosine-3'-phosphate
  modified_base 21: mod_base = OTHER; note = 2'-O-methyladenosine
aactcaataaagtgctttgaa

SEQ ID NO: 1867 - RNA, 23 nt, synthetic construct
  source 1..23: mol_type = other RNA
  modified_base 1: mod_base = OTHER; note = 2'-O-methyluridine-3'-phosphorothioate
  modified_base 2: mod_base = OTHER; note = 2'-deoxy-2'-fluorouridine-3'-phosphorothioate
  modified_base 3: mod_base = OTHER; note = 2'-O-methylcytidine-3'-phosphate
  modified_base 4: mod_base = OTHER; note = 2'-O-methyladenosine-3'-phosphate
  modified_base 5: mod_base = OTHER; note = 2'-O-methyladenosine-3'-phosphate
  modified_base 6: mod_base = OTHER; note = 2'-deoxy-2'-fluoroadenosine-3'-phosphate
  modified_base 7: mod_base = OTHER; note = 2'-O-methylguanosine-3'-phosphate
  modified_base 8: mod_base = OTHER; note = 2'-deoxy-2'-fluorocytidine-3'-phosphate
  modified_base 9: mod_base = OTHER; note = 2'-deoxy-2'-fluoroadenosine-3'-phosphate
  modified_base 10: mod_base = OTHER; note = 2'-O-methylcytidine-3'-phosphate
  modified_base 11: mod_base = OTHER; note = 2'-O-methyluridine-3'-phosphate
  modified_base 12: mod_base = OTHER; note = 2'-O-methyluridine-3'-phosphate
  modified_base 13: mod_base = OTHER; note = 2'-O-methyluridine-3'-phosphate
  modified_base 14: mod_base = OTHER; note = 2'-deoxy-2'-fluoroadenosine-3'-phosphate
  modified_base 15: mod_base = OTHER; note = 2'-O-methyluridine-3'-phosphate
  modified_base 16: mod_base = OTHER; note = 2'-deoxy-2'-fluorouridine-3'-phosphate
  modified_base 17: mod_base = OTHER; note = 2'-O-methylguanosine-3'-phosphate
  modified_base 18: mod_base = OTHER; note = 2'-O-methyladenosine-3'-phosphate
  modified_base 19: mod_base = OTHER; note = 2'-O-methylguanosine-3'-phosphate
  modified_base 20: mod_base = OTHER; note = 2'-O-methyluridine-3'-phosphate
  modified_base 21: mod_base = OTHER; note = 2'-O-methyluridine-3'-phosphorothioate
  modified_base 22: mod_base = OTHER; note = 2'-O-methyluridine-3'-phosphorothioate
  modified_base 23: mod_base = OTHER; note = 2'-O-methylcytidine
ttcaaagcactttattgagtttc

SEQ ID NO: 1868 - RNA, 21 nt, synthetic construct
  source 1..21: mol_type = other RNA
  modified_base 1: mod_base = OTHER; note = 2'-O-methyladenosine-3'-phosphorothioate
  modified_base 2: mod_base = OTHER; note = 2'-O-methyladenosine-3'-phosphorothioate
  modified_base 3: mod_base = OTHER; note = 2'-O-methylcytidine-3'-phosphate
  modified_base 4: mod_base = OTHER; note = 2'-O-methyluridine-3'-phosphate
  modified_base 5: mod_base = OTHER; note = 2'-O-methylcytidine-3'-phosphate
  modified_base 6: mod_base = OTHER; note = 2'-O-methyladenosine-3'-phosphate
  modified_base 7: mod_base = OTHER; note = 2'-deoxy-2'-fluoroadenosine-3'-phosphate
  modified_base 8: mod_base = OTHER; note = 2'-O-methyluridine-3'-phosphate
  modified_base 9: mod_base = OTHER; note = 2'-deoxy-2'-fluoroadenosine-3'-phosphate
  modified_base 10: mod_base = OTHER; note = 2'-deoxy-2'-fluoroadenosine-3'-phosphate
  modified_base 11: mod_base = OTHER; note = 2'-deoxy-2'-fluoroadenosine-3'-phosphate
  modified_base 12: mod_base = OTHER; note = 2'-O-methylguanosine-3'-phosphate
  modified_base 13: mod_base = OTHER; note = 2'-O-methyluridine-3'-phosphate
  modified_base 14: mod_base = OTHER; note = 2'-O-methylguanosine-3'-phosphate
  modified_base 15: mod_base = OTHER; note = 2'-O-methylcytidine-3'-phosphate
  modified_base 16: mod_base = OTHER; note = 2'-O-methyluridine-3'-phosphate
  modified_base 17: mod_base = OTHER; note = 2'-O-methyluridine-3'-phosphate
  modified_base 18: mod_base = OTHER; note = 2'-O-methyluridine-3'-phosphate
  modified_base 19: mod_base = OTHER; note = 2'-O-methylguanosine-3'-phosphate
  modified_base 20: mod_base = OTHER; note = 2'-O-methyladenosine-3'-phosphate
  modified_base 21: mod_base = OTHER; note = 2'-O-methyladenosine
aactcaataaagtgctttgaa

SEQ ID NO: 1869 - RNA, 23 nt, synthetic construct
  source 1..23: mol_type = other RNA
  modified_base 1: mod_base = OTHER; note = 2'-O-methyluridine-3'-phosphorothioate 5'-(E)-Vinylphosphonate
  modified_base 2: mod_base = OTHER; note = 2'-deoxy-2'-fluorouridine-3'-phosphorothioate
  modified_base 3: mod_base = OTHER; note = 2'-O-methylcytidine-3'-phosphate
  modified_base 4: mod_base = OTHER; note = 2'-O-methyladenosine-3'-phosphate
  modified_base 5: mod_base = OTHER; note = 2'-O-methyladenosine-3'-phosphate
  modified_base 6: mod_base = OTHER; note = 2'-deoxy-2'-fluoroadenosine-3'-phosphate
  modified_base 7: mod_base = OTHER; note = 2'-O-methylguanosine-3'-phosphate
  modified_base 8: mod_base = OTHER; note = 2'-deoxy-2'-fluorocytidine-3'-phosphate
  modified_base 9: mod_base = OTHER; note = 2'-deoxy-2'-fluoroadenosine-3'-phosphate
  modified_base 10: mod_base = OTHER; note = 2'-O-methylcytidine-3'-phosphate
  modified_base 11: mod_base = OTHER; note = 2'-O-methyluridine-3'-phosphate
  modified_base 12: mod_base = OTHER; note = 2'-O-methyluridine-3'-phosphate
  modified_base 13: mod_base = OTHER; note = 2'-O-methyluridine-3'-phosphate
  modified_base 14: mod_base = OTHER; note = 2'-deoxy-2'-fluoroadenosine-3'-phosphate
  modified_base 15: mod_base = OTHER; note = 2'-O-methyluridine-3'-phosphate
  modified_base 16: mod_base = OTHER; note = 2'-deoxy-2'-fluorouridine-3'-phosphate
  modified_base 17: mod_base = OTHER; note = 2'-O-methylguanosine-3'-phosphate
  modified_base 18: mod_base = OTHER; note = 2'-O-methyladenosine-3'-phosphate
  modified_base 19: mod_base = OTHER; note = 2'-O-methylguanosine-3'-phosphate
  modified_base 20: mod_base = OTHER; note = 2'-O-methyluridine-3'-phosphate
  modified_base 21: mod_base = OTHER; note = 2'-O-methyluridine-3'-phosphorothioate
  modified_base 22: mod_base = OTHER; note = 2'-O-methyluridine-3'-phosphorothioate
  modified_base 23: mod_base = OTHER; note = 2'-O-methylcytidine
ttcaaagcactttattgagtttc

SEQ ID NO: 1870 - RNA, 19 nt, synthetic construct
  source 1..19: mol_type = other RNA
gccaggatggcgcaggaaa

SEQ ID NO: 1871 - RNA, 19 nt, synthetic construct
  source 1..19: mol_type = other RNA
ccaggatggcgcaggaact

SEQ ID NO: 1872 - RNA, 19 nt, synthetic construct
  source 1..19: mol_type = other RNA
caggatggcgcaggaacta

SEQ ID NO: 1873 - RNA, 19 nt, synthetic construct
  source 1..19: mol_type = other RNA
aggatggcgcaggaactca

SEQ ID NO: 1874 - RNA, 19 nt, synthetic construct
  source 1..19: mol_type = other RNA
ggatggcgcaggaactcaa

SEQ ID NO: 1875 - RNA, 19 nt, synthetic construct
  source 1..19: mol_type = other RNA
gatggcgcaggaactcaat

SEQ ID NO: 1876 - RNA, 19 nt, synthetic construct
  source 1..19: mol_type = other RNA
atggcgcaggaactcaata

SEQ ID NO: 1877 - RNA, 19 nt, synthetic construct
  source 1..19: mol_type = other RNA
tggcgcaggaactcaataa

SEQ ID NO: 1878 - RNA, 19 nt, synthetic construct
  source 1..19: mol_type = other RNA
ggcgcaggaactcaataaa

SEQ ID NO: 1879 - RNA, 19 nt, synthetic construct
  source 1..19: mol_type = other RNA
gcgcaggaactcaataaaa

SEQ ID NO: 1880 - RNA, 19 nt, synthetic construct
  source 1..19: mol_type = other RNA
cgcaggaactcaataaagt

SEQ ID NO: 1881 - RNA, 19 nt, synthetic construct
  source 1..19: mol_type = other RNA
gcaggaactcaataaagta

SEQ ID NO: 1882 - RNA, 19 nt, synthetic construct
  source 1..19: mol_type = other RNA
caggaactcaataaagtga

SEQ ID NO: 1883 - RNA, 19 nt, synthetic construct
  source 1..19: mol_type = other RNA
aggaactcaataaagtgct

SEQ ID NO: 1884 - RNA, 19 nt, synthetic construct
  source 1..19: mol_type = other RNA
ggaactcaataaagtgctt

SEQ ID NO: 1885 - RNA, 19 nt, synthetic construct
  source 1..19: mol_type = other RNA
gaactcaataaagtgcttt

SEQ ID NO: 1886 - RNA, 19 nt, synthetic construct
  source 1..19: mol_type = other RNA
aactcaataaagtgcttta

SEQ ID NO: 1887 - RNA, 19 nt, synthetic construct
  source 1..19: mol_type = other RNA
actcaataaagtgctttga

SEQ ID NO: 1888 - RNA, 19 nt, synthetic construct
  source 1..19: mol_type = other RNA
tcaataaagtgctttgaaa

SEQ ID NO: 1889 - RNA, 19 nt, synthetic construct
  source 1..19: mol_type = other RNA
caataaagtgctttgaaaa

SEQ ID NO: 1890 - RNA, 19 nt, synthetic construct
  source 1..19: mol_type = other RNA
aataaagtgctttgaaaat

SEQ ID NO: 1891 - RNA, 19 nt, synthetic construct
  source 1..19: mol_type = other RNA
ataaagtgctttgaaaata

SEQ ID NO: 1892 - RNA, 19 nt, synthetic construct
  source 1..19: mol_type = other RNA
taaagtgctttgaaaatga

SEQ ID NO: 1893 - RNA, 19 nt, synthetic construct
  source 1..19: mol_type = other RNA
aaagtgctttgaaaatgct

SEQ ID NO: 1894 - RNA, 19 nt, synthetic construct
  source 1..19: mol_type = other RNA
aagtgctttgaaaatgcta

SEQ ID NO: 1895 - RNA, 19 nt, synthetic construct
  source 1..19: mol_type = other RNA
agtgctttgaaaatgctga

SEQ ID NO: 1896 - RNA, 19 nt, synthetic construct
  source 1..19: mol_type = other RNA
gtgctttgaaaatgctgaa

SEQ ID NO: 1897 - RNA, 19 nt, synthetic construct
  source 1..19: mol_type = other RNA
tgctttgaaaatgctgaga

SEQ ID NO: 1898 - RNA, 19 nt, synthetic construct
  source 1..19: mol_type = other RNA
gctttgaaaatgctgagaa

SEQ ID NO: 1899 - RNA, 19 nt, synthetic construct
  source 1..19: mol_type = other RNA
ctttgaaaatgctgagaaa

SEQ ID NO: 1900 - RNA, 19 nt, synthetic construct
  source 1..19: mol_type = other RNA
tttgaaaatgctgagaaaa

SEQ ID NO: 1901 - RNA, 19 nt, synthetic construct
  source 1..19: mol_type = other RNA
ttgaaaatgctgagaaaaa

SEQ ID NO: 1902 - RNA, 19 nt, synthetic construct
  source 1..19: mol_type = other RNA
tgaaaatgctgagaaaaaa

SEQ ID NO: 1903 - RNA, 19 nt, synthetic construct
  source 1..19: mol_type = other RNA
gaaaatgctgagaaaaaaa

SEQ ID NO: 1904 - RNA, 19 nt, synthetic construct
  source 1..19: mol_type = other RNA
aaaatgctgagaaaaaaaa

SEQ ID NO: 1905 - RNA, 19 nt, synthetic construct
  source 1..19: mol_type = other RNA
aaatgctgagaaaaaaaaa

SEQ ID NO: 1906 - RNA, 19 nt, synthetic construct
  source 1..19: mol_type = other RNA
aatgctgagaaaaaaaaaa

SEQ ID NO: 1907 - RNA, 19 nt, synthetic construct
  source 1..19: mol_type = other RNA
atgctgagaaaaaaaaaaa

SEQ ID NO: 1908 - RNA, 19 nt, synthetic construct
  source 1..19: mol_type = other RNA
tttcctgcgccatcctggc

SEQ ID NO: 1909 - RNA, 19 nt, synthetic construct
  source 1..19: mol_type = other RNA
agttcctgcgccatcctgg

SEQ ID NO: 1910 - RNA, 19 nt, synthetic construct
  source 1..19: mol_type = other RNA
tagttcctgcgccatcctg

SEQ ID NO: 1911 - RNA, 19 nt, synthetic construct
  source 1..19: mol_type = other RNA
tgagttcctgcgccatcct

SEQ ID NO: 1912 - RNA, 19 nt, synthetic construct
  source 1..19: mol_type = other RNA
ttgagttcctgcgccatcc

SEQ ID NO: 1913 - RNA, 19 nt, synthetic construct
  source 1..19: mol_type = other RNA
attgagttcctgcgccatc

SEQ ID NO: 1914 - RNA, 19 nt, synthetic construct
  source 1..19: mol_type = other RNA
tattgagttcctgcgccat

SEQ ID NO: 1915 - RNA, 19 nt, synthetic construct
  source 1..19: mol_type = other RNA
ttattgagttcctgcgcca

SEQ ID NO: 1916 - RNA, 19 nt, synthetic construct
  source 1..19: mol_type = other RNA
tttattgagttcctgcgcc

SEQ ID NO: 1917 - RNA, 19 nt, synthetic construct
  source 1..19: mol_type = other RNA
ttttattgagttcctgcgc

SEQ ID NO: 1918 - RNA, 19 nt, synthetic construct
  source 1..19: mol_type = other RNA
actttattgagttcctgcg

SEQ ID NO: 1919 - RNA, 19 nt, synthetic construct
  source 1..19: mol_type = other RNA
tactttattgagttcctgc

SEQ ID NO: 1920 - RNA, 19 nt, synthetic construct
  source 1..19: mol_type = other RNA
tcactttattgagttcctg

SEQ ID NO: 1921 - RNA, 19 nt, synthetic construct
  source 1..19: mol_type = other RNA
agcactttattgagttcct

SEQ ID NO: 1922 - RNA, 19 nt, synthetic construct
  source 1..19: mol_type = other RNA
aagcactttattgagttcc

SEQ ID NO: 1923 - RNA, 19 nt, synthetic construct
  source 1..19: mol_type = other RNA
aaagcactttattgagttc

SEQ ID NO: 1924 - RNA, 19 nt, synthetic construct
  source 1..19: mol_type = other RNA
taaagcactttattgagtt

SEQ ID NO: 1925 - RNA, 19 nt, synthetic construct
  source 1..19: mol_type = other RNA
tcaaagcactttattgagt

SEQ ID NO: 1926 - RNA, 19 nt, synthetic construct
  source 1..19: mol_type = other RNA
tttcaaagcactttattga

SEQ ID NO: 1927 - RNA, 19 nt, synthetic construct
  source 1..19: mol_type = other RNA
ttttcaaagcactttattg

SEQ ID NO: 1928 - RNA, 19 nt, synthetic construct
  source 1..19: mol_type = other RNA
attttcaaagcactttatt

SEQ ID NO: 1929 - RNA, 19 nt, synthetic construct
  source 1..19: mol_type = other RNA
tattttcaaagcactttat

SEQ ID NO: 1930 - RNA, 19 nt, synthetic construct
  source 1..19: mol_type = other RNA
tcattttcaaagcacttta

SEQ ID NO: 1931 - RNA, 19 nt, synthetic construct
  source 1..19: mol_type = other RNA
agcattttcaaagcacttt

SEQ ID NO: 1932 - RNA, 19 nt, synthetic construct
  source 1..19: mol_type = other RNA
tagcattttcaaagcactt

SEQ ID NO: 1933 - RNA, 19 nt, synthetic construct
  source 1..19: mol_type = other RNA
tcagcattttcaaagcact

SEQ ID NO: 1934 - RNA, 19 nt, synthetic construct
  source 1..19: mol_type = other RNA
ttcagcattttcaaagcac

SEQ ID NO: 1935 - RNA, 19 nt, synthetic construct
  source 1..19: mol_type = other RNA
tctcagcattttcaaagca

SEQ ID NO: 1936 - RNA, 19 nt, synthetic construct
  source 1..19: mol_type = other RNA
ttctcagcattttcaaagc

SEQ ID NO: 1937 - RNA, 19 nt, synthetic construct
  source 1..19: mol_type = other RNA
tttctcagcattttcaaag

SEQ ID NO: 1938 - RNA, 19 nt, synthetic construct
  source 1..19: mol_type = other RNA
ttttctcagcattttcaaa

SEQ ID NO: 1939 - RNA, 19 nt, synthetic construct
  source 1..19: mol_type = other RNA
tttttctcagcattttcaa

SEQ ID NO: 1940 - RNA, 19 nt, synthetic construct
  source 1..19: mol_type = other RNA
ttttttctcagcattttca

SEQ ID NO: 1941 - RNA, 19 nt, synthetic construct
  source 1..19: mol_type = other RNA
tttttttctcagcattttc

SEQ ID NO: 1942 - RNA, 19 nt, synthetic construct
  source 1..19: mol_type = other RNA
ttttttttctcagcatttt

SEQ ID NO: 1943 - RNA, 19 nt, synthetic construct
  source 1..19: mol_type = other RNA
tttttttttctcagcattt

SEQ ID NO: 1944 - RNA, 19 nt, synthetic construct
  source 1..19: mol_type = other RNA
ttttttttttctcagcatt

SEQ ID NO: 1945 - RNA, 19 nt, synthetic construct
  source 1..19: mol_type = other RNA
tttttttttttctcagcat

SEQ ID NO: 1946 - DNA, 21 bp, synthetic construct
  source 1..21: mol_type = other DNA
  modified_base 1: mod_base = OTHER; note = guanosine-3'-phosphate
  modified_base 2: mod_base = OTHER; note = cytidine-3'-phosphate
  modified_base 3: mod_base = OTHER; note = cytidine-3'-phosphate
  modified_base 4: mod_base = OTHER; note = adenosine-3'-phosphate
  modified_base 5: mod_base = OTHER; note = guanosine-3'-phosphate
  modified_base 6: mod_base = OTHER; note = guanosine-3'-phosphate
  modified_base 7: mod_base = OTHER; note = adenosine-3'-phosphate
  modified_base 8: mod_base = OTHER; note = uridine-3'-phosphate
  modified_base 9: mod_base = OTHER; note = guanosine-3'-phosphate
  modified_base 10: mod_base = OTHER; note = guanosine-3'-phosphate
  modified_base 11: mod_base = OTHER; note = cytidine-3'-phosphate
  modified_base 12: mod_base = OTHER; note = guanosine-3'-phosphate
  modified_base 13: mod_base = OTHER; note = cytidine-3'-phosphate
  modified_base 14: mod_base = OTHER; note = adenosine-3'-phosphate
  modified_base 15: mod_base = OTHER; note = guanosine-3'-phosphate
  modified_base 16: mod_base = OTHER; note = guanosine-3'-phosphate
  modified_base 17: mod_base = OTHER; note = adenosine-3'-phosphate
  modified_base 18: mod_base = OTHER; note = adenosine-3'-phosphate
  modified_base 19: mod_base = OTHER; note = adenosine-3'-phosphate
  misc_feature 1..19: note = RNA
  misc_feature 20..21: note = DNA
gccaggatggcgcaggaaatt

SEQ ID NO: 1947 - DNA, 21 bp, synthetic construct
  source 1..21: mol_type = other DNA
  modified_base 1: mod_base = OTHER; note = cytidine-3'-phosphate
  modified_base 2: mod_base = OTHER; note = cytidine-3'-phosphate
  modified_base 3: mod_base = OTHER; note = adenosine-3'-phosphate
  modified_base 4: mod_base = OTHER; note = guanosine-3'-phosphate
  modified_base 5: mod_base = OTHER; note = guanosine-3'-phosphate
  modified_base 6: mod_base = OTHER; note = adenosine-3'-phosphate
  modified_base 7: mod_base = OTHER; note = uridine-3'-phosphate
  modified_base 8: mod_base = OTHER; note = guanosine-3'-phosphate
  modified_base 9: mod_base = OTHER; note = guanosine-3'-phosphate
  modified_base 10: mod_base = OTHER; note = cytidine-3'-phosphate
  modified_base 11: mod_base = OTHER; note = guanosine-3'-phosphate
  modified_base 12: mod_base = OTHER; note = cytidine-3'-phosphate
  modified_base 13: mod_base = OTHER; note = adenosine-3'-phosphate
  modified_base 14: mod_base = OTHER; note = guanosine-3'-phosphate
  modified_base 15: mod_base = OTHER; note = guanosine-3'-phosphate
  modified_base 16: mod_base = OTHER; note = adenosine-3'-phosphate
  modified_base 17: mod_base = OTHER; note = adenosine-3'-phosphate
  modified_base 18: mod_base = OTHER; note = cytidine-3'-phosphate
  modified_base 19: mod_base = OTHER; note = uridine-3'-phosphate
  misc_feature 1..19: note = RNA
  misc_feature 20..21: note = DNA
ccaggatggcgcaggaacttt

SEQ ID NO: 1948 - DNA, 21 bp, synthetic construct
  source 1..21: mol_type = other DNA
  modified_base 1: mod_base = OTHER; note = cytidine-3'-phosphate
  modified_base 2: mod_base = OTHER; note = adenosine-3'-phosphate
  modified_base 3: mod_base = OTHER; note = guanosine-3'-phosphate
  modified_base 4: mod_base = OTHER; note = guanosine-3'-phosphate
  modified_base 5: mod_base = OTHER; note = adenosine-3'-phosphate
  modified_base 6: mod_base = OTHER; note = uridine-3'-phosphate
  modified_base 7: mod_base = OTHER; note = guanosine-3'-phosphate
  modified_base 8: mod_base = OTHER; note = guanosine-3'-phosphate
  modified_base 9: mod_base = OTHER; note = cytidine-3'-phosphate
  modified_base 10: mod_base = OTHER; note = guanosine-3'-phosphate
  modified_base 11: mod_base = OTHER; note = cytidine-3'-phosphate
  modified_base 12: mod_base = OTHER; note = adenosine-3'-phosphate
  modified_base 13: mod_base = OTHER; note = guanosine-3'-phosphate
  modified_base 14: mod_base = OTHER; note = guanosine-3'-phosphate
  modified_base 15: mod_base = OTHER; note = adenosine-3'-phosphate
  modified_base 16: mod_base = OTHER; note = adenosine-3'-phosphate
  modified_base 17: mod_base = OTHER; note = cytidine-3'-phosphate
  modified_base 18: mod_base = OTHER; note = uridine-3'-phosphate
  modified_base 19: mod_base = OTHER; note = adenosine-3'-phosphate
  misc_feature 1..19: note = RNA
  misc_feature 20..21: note = DNA
caggatggcgcaggaactatt

SEQ ID NO: 1949 - DNA, 21 bp, synthetic construct
  source 1..21: mol_type = other DNA
  modified_base 1: mod_base = OTHER; note = adenosine-3'-phosphate
  modified_base 2: mod_base = OTHER; note = guanosine-3'-phosphate
  modified_base 3: mod_base = OTHER; note = guanosine-3'-phosphate
  modified_base 4: mod_base = OTHER; note = adenosine-3'-phosphate
  modified_base 5: mod_base = OTHER; note = uridine-3'-phosphate
  modified_base 6: mod_base = OTHER; note = guanosine-3'-phosphate
  modified_base 7: mod_base = OTHER; note = guanosine-3'-phosphate
  modified_base 8: mod_base = OTHER; note = cytidine-3'-phosphate
  modified_base 9: mod_base = OTHER; note = guanosine-3'-phosphate
  modified_base 10: mod_base = OTHER; note = cytidine-3'-phosphate
  modified_base 11: mod_base = OTHER; note = adenosine-3'-phosphate
  modified_base 12: mod_base = OTHER; note = guanosine-3'-phosphate
  modified_base 13: mod_base = OTHER; note = guanosine-3'-phosphate
  modified_base 14: mod_base = OTHER; note = adenosine-3'-phosphate
  modified_base 15: mod_base = OTHER; note = adenosine-3'-phosphate
  modified_base 16: mod_base = OTHER; note = cytidine-3'-phosphate
  modified_base 17: mod_base = OTHER; note = uridine-3'-phosphate
  modified_base 18: mod_base = OTHER; note = cytidine-3'-phosphate
  modified_base 19: mod_base = OTHER; note = adenosine-3'-phosphate
  misc_feature 1..19: note = RNA
  misc_feature 20..21: note = DNA
aggatggcgcaggaactcatt

SEQ ID NO: 1950 - DNA, 21 bp, synthetic construct
  source 1..21: mol_type = other DNA
  modified_base 1: mod_base = OTHER; note = guanosine-3'-phosphate
  modified_base 2: mod_base = OTHER; note = guanosine-3'-phosphate
  modified_base 3: mod_base = OTHER; note = adenosine-3'-phosphate
  modified_base 4: mod_base = OTHER; note = uridine-3'-phosphate
  modified_base 5: mod_base = OTHER; note = guanosine-3'-phosphate
  modified_base 6: mod_base = OTHER; note = guanosine-3'-phosphate
  modified_base 7: mod_base = OTHER; note = cytidine-3'-phosphate
  modified_base 8: mod_base = OTHER; note = guanosine-3'-phosphate
  modified_base 9: mod_base = OTHER; note = cytidine-3'-phosphate
  modified_base 10: mod_base = OTHER; note = adenosine-3'-phosphate
  modified_base 11: mod_base = OTHER; note = guanosine-3'-phosphate
  modified_base 12: mod_base = OTHER; note = guanosine-3'-phosphate
  modified_base 13: mod_base = OTHER; note = adenosine-3'-phosphate
  modified_base 14: mod_base = OTHER; note = adenosine-3'-phosphate
  modified_base 15: mod_base = OTHER; note = cytidine-3'-phosphate
  modified_base 16: mod_base = OTHER; note = uridine-3'-phosphate
  modified_base 17: mod_base = OTHER; note = cytidine-3'-phosphate
  modified_base 18: mod_base = OTHER; note = adenosine-3'-phosphate
  modified_base 19: mod_base = OTHER; note = adenosine-3'-phosphate
  misc_feature 1..19: note = RNA
  misc_feature 20..21: note = DNA
ggatggcgcaggaactcaatt

SEQ ID NO: 1951 - DNA, 21 bp, synthetic construct
  source 1..21: mol_type = other DNA
  modified_base 1: mod_base = OTHER; note = guanosine-3'-phosphate
  modified_base 2: mod_base = OTHER; note = adenosine-3'-phosphate
  modified_base 3: mod_base = OTHER; note = uridine-3'-phosphate
  modified_base 4: mod_base = OTHER; note = guanosine-3'-phosphate
  modified_base 5: mod_base = OTHER; note = guanosine-3'-phosphate
  modified_base 6: mod_base = OTHER; note = cytidine-3'-phosphate
  modified_base 7: mod_base = OTHER; note = guanosine-3'-phosphate
  modified_base 8: mod_base = OTHER; note = cytidine-3'-phosphate
  modified_base 9: mod_base = OTHER; note = adenosine-3'-phosphate
  modified_base 10: mod_base = OTHER; note = guanosine-3'-phosphate
  modified_base 11: mod_base = OTHER; note = guanosine-3'-phosphate
  modified_base 12: mod_base = OTHER; note = adenosine-3'-phosphate
  modified_base 13: mod_base = OTHER; note = adenosine-3'-phosphate
  modified_base 14: mod_base = OTHER; note = cytidine-3'-phosphate
  modified_base 15: mod_base = OTHER; note = uridine-3'-phosphate
  modified_base 16: mod_base = OTHER; note = cytidine-3'-phosphate
  modified_base 17: mod_base = OTHER; note = adenosine-3'-phosphate
  modified_base 18: mod_base = OTHER; note = adenosine-3'-phosphate
  modified_base 19: mod_base = OTHER; note = uridine-3'-phosphate
  misc_feature 1..19: note = RNA
  misc_feature 20..21: note = DNA
gatggcgcaggaactcaattt

SEQ ID NO: 1952 - DNA, 21 bp, synthetic construct
  source 1..21: mol_type = other DNA
  modified_base 1: mod_base = OTHER; note = adenosine-3'-phosphate
  modified_base 2: mod_base = OTHER; note = uridine-3'-phosphate
  modified_base 3: mod_base = OTHER; note = guanosine-3'-phosphate
  modified_base 4: mod_base = OTHER; note = guanosine-3'-phosphate
  modified_base 5: mod_base = OTHER; note = cytidine-3'-phosphate
  modified_base 6: mod_base = OTHER; note = guanosine-3'-phosphate
  modified_base 7: mod_base = OTHER; note = cytidine-3'-phosphate
  modified_base 8: mod_base = OTHER; note = adenosine-3'-phosphate
  modified_base 9: mod_base = OTHER; note = guanosine-3'-phosphate
  modified_base 10: mod_base = OTHER; note = guanosine-3'-phosphate
  modified_base 11: mod_base = OTHER; note = adenosine-3'-phosphate
  modified_base 12: mod_base = OTHER; note = adenosine-3'-phosphate
  modified_base 13: mod_base = OTHER; note = cytidine-3'-phosphate
  modified_base 14: mod_base = OTHER; note = uridine-3'-phosphate
  modified_base 15: mod_base = OTHER; note = cytidine-3'-phosphate
  modified_base 16: mod_base = OTHER; note = adenosine-3'-phosphate
  modified_base 17: mod_base = OTHER; note = adenosine-3'-phosphate
  modified_base 18: mod_base = OTHER; note = uridine-3'-phosphate
  modified_base 19: mod_base = OTHER; note = adenosine-3'-phosphate
  misc_feature 1..19: note = RNA
  misc_feature 20..21: note = DNA
atggcgcaggaactcaatatt

SEQ ID NO: 1953 - DNA, 21 bp, synthetic construct
  source 1..21: mol_type = other DNA
  modified_base 1: mod_base = OTHER; note = uridine-3'-phosphate
  modified_base 2: mod_base = OTHER; note = guanosine-3'-phosphate
  modified_base 3: mod_base = OTHER; note = guanosine-3'-phosphate
  modified_base 4: mod_base = OTHER; note = cytidine-3'-phosphate
  modified_base 5: mod_base = OTHER; note = guanosine-3'-phosphate
  modified_base 6: mod_base = OTHER; note = cytidine-3'-phosphate
  modified_base 7: mod_base = OTHER; note = adenosine-3'-phosphate
  modified_base 8: mod_base = OTHER; note = guanosine-3'-phosphate
  modified_base 9: mod_base = OTHER; note = guanosine-3'-phosphate
  modified_base 10: mod_base = OTHER; note = adenosine-3'-phosphate
  modified_base 11: mod_base = OTHER; note = adenosine-3'-phosphate
  modified_base 12: mod_base = OTHER; note = cytidine-3'-phosphate
  modified_base 13: mod_base = OTHER; note = uridine-3'-phosphate
  modified_base 14: mod_base = OTHER; note = cytidine-3'-phosphate
  modified_base 15: mod_base = OTHER; note = adenosine-3'-phosphate
  modified_base 16: mod_base = OTHER; note = adenosine-3'-phosphate
  modified_base 17: mod_base = OTHER; note = uridine-3'-phosphate
  modified_base 18: mod_base = OTHER; note = adenosine-3'-phosphate
  modified_base 19: mod_base = OTHER; note = adenosine-3'-phosphate
  misc_feature 1..19: note = RNA
  misc_feature 20..21: note = DNA
tggcgcaggaactcaataatt

SEQ ID NO: 1954 - DNA, 21 bp, synthetic construct
  source 1..21: mol_type = other DNA
  modified_base 1: mod_base = OTHER; note = guanosine-3'-phosphate
  modified_base 2: mod_base = OTHER; note = guanosine-3'-phosphate
  modified_base 3: mod_base = OTHER; note = cytidine-3'-phosphate
  modified_base 4: mod_base = OTHER; note = guanosine-3'-phosphate
  modified_base 5: mod_base = OTHER; note = cytidine-3'-phosphate
  modified_base 6: mod_base = OTHER; note = adenosine-3'-phosphate
  modified_base 7: mod_base = OTHER; note = guanosine-3'-phosphate
  modified_base 8: mod_base = OTHER; note = guanosine-3'-phosphate
  modified_base 9: mod_base = OTHER; note = adenosine-3'-phosphate
  modified_base 10: mod_base = OTHER; note = adenosine-3'-phosphate
  modified_base 11: mod_base = OTHER; note = cytidine-3'-phosphate
  modified_base 12: mod_base = OTHER; note = uridine-3'-phosphate
  modified_base 13: mod_base = OTHER; note = cytidine-3'-phosphate
  modified_base 14: mod_base = OTHER; note = adenosine-3'-phosphate
  modified_base 15: mod_base = OTHER; note = adenosine-3'-phosphate
  modified_base 16: mod_base = OTHER; note = uridine-3'-phosphate
  modified_base 17: mod_base = OTHER; note = adenosine-3'-phosphate
  modified_base 18: mod_base = OTHER; note = adenosine-3'-phosphate
  modified_base 19: mod_base = OTHER; note = adenosine-3'-phosphate
  misc_feature 1..19: note = RNA
  misc_feature 20..21: note = DNA
ggcgcaggaactcaataaatt

SEQ ID NO: 1955 - DNA, 21 bp, synthetic construct
  source 1..21: mol_type = other DNA
  modified_base 1: mod_base = OTHER; note = guanosine-3'-phosphate
  modified_base 2: mod_base = OTHER; note = cytidine-3'-phosphate
  modified_base 3: mod_base = OTHER; note = guanosine-3'-phosphate
  modified_base 4: mod_base = OTHER; note = cytidine-3'-phosphate
  modified_base 5: mod_base = OTHER; note = adenosine-3'-phosphate
  modified_base 6: mod_base = OTHER; note = guanosine-3'-phosphate
  modified_base 7: mod_base = OTHER; note = guanosine-3'-phosphate
  modified_base 8: mod_base = OTHER; note = adenosine-3'-phosphate
  modified_base 9: mod_base = OTHER; note = adenosine-3'-phosphate
  modified_base 10: mod_base = OTHER; note = cytidine-3'-phosphate
  modified_base 11: mod_base = OTHER; note = uridine-3'-phosphate
  modified_base 12: mod_base = OTHER; note = cytidine-3'-phosphate
  modified_base 13: mod_base = OTHER; note = adenosine-3'-phosphate
  modified_base 14: mod_base = OTHER; note = adenosine-3'-phosphate
  modified_base 15: mod_base = OTHER; note = uridine-3'-phosphate
  modified_base 16: mod_base = OTHER; note = adenosine-3'-phosphate
  modified_base 17: mod_base = OTHER; note = adenosine-3'-phosphate
  modified_base 18: mod_base = OTHER; note = adenosine-3'-phosphate
  modified_base 19: mod_base = OTHER; note = adenosine-3'-phosphate
  misc_feature 1..19: note = RNA
  misc_feature 20..21: note = DNA
gcgcaggaactcaataaaatt

SEQ ID NO: 1956 - DNA, 21 bp, synthetic construct
  source 1..21: mol_type = other DNA
  modified_base 1: mod_base = OTHER; note = cytidine-3'-phosphate
  modified_base 2: mod_base = OTHER; note = guanosine-3'-phosphate
  modified_base 3: mod_base = OTHER; note = cytidine-3'-phosphate
  modified_base 4: mod_base = OTHER; note = adenosine-3'-phosphate
  modified_base 5: mod_base = OTHER; note = guanosine-3'-phosphate
  modified_base 6: mod_base = OTHER; note = guanosine-3'-phosphate
  modified_base 7: mod_base = OTHER; note = adenosine-3'-phosphate
  modified_base 8: mod_base = OTHER; note = adenosine-3'-phosphate
  modified_base 9: mod_base = OTHER; note = cytidine-3'-phosphate
  modified_base 10: mod_base = OTHER; note = uridine-3'-phosphate
  modified_base 11: mod_base = OTHER; note = cytidine-3'-phosphate
  modified_base 12: mod_base = OTHER; note = adenosine-3'-phosphate
  modified_base 13: mod_base = OTHER; note = adenosine-3'-phosphate
  modified_base 14: mod_base = OTHER; note = uridine-3'-phosphate
  modified_base 15: mod_base = OTHER; note = adenosine-3'-phosphate
  modified_base 16: mod_base = OTHER; note = adenosine-3'-phosphate
  modified_base 17: mod_base = OTHER; note = adenosine-3'-phosphate
  modified_base 18: mod_base = OTHER; note = guanosine-3'-phosphate
  modified_base 19: mod_base = OTHER; note = uridine-3'-phosphate
  misc_feature 1..19: note = RNA
  misc_feature 20..21: note = DNA
cgcaggaactcaataaagttt

SEQ ID NO: 1957 - DNA, 21 bp, synthetic construct
  source 1..21: mol_type = other DNA
  modified_base 1: mod_base = OTHER; note = guanosine-3'-phosphate
  modified_base 2: mod_base = OTHER; note = cytidine-3'-phosphate
  modified_base 3: mod_base = OTHER; note = adenosine-3'-phosphate
  modified_base 4: mod_base = OTHER; note = guanosine-3'-phosphate
  modified_base 5: mod_base = OTHER; note = guanosine-3'-phosphate
  modified_base 6: mod_base = OTHER; note = adenosine-3'-phosphate
  modified_base 7: mod_base = OTHER; note = adenosine-3'-phosphate
  modified_base 8: mod_base = OTHER; note = cytidine-3'-phosphate
  modified_base 9: mod_base = OTHER; note = uridine-3'-phosphate
  modified_base 10: mod_base = OTHER; note = cytidine-3'-phosphate
  modified_base 11: mod_base = OTHER; note = adenosine-3'-phosphate
  modified_base 12: mod_base = OTHER; note = adenosine-3'-phosphate
  modified_base 13: mod_base = OTHER; note = uridine-3'-phosphate
  modified_base 14: mod_base = OTHER; note = adenosine-3'-phosphate
  modified_base 15: mod_base = OTHER; note = adenosine-3'-phosphate
  modified_base 16: mod_base = OTHER; note = adenosine-3'-phosphate
  modified_base 17: mod_base = OTHER; note = guanosine-3'-phosphate
  modified_base 18: mod_base = OTHER; note = uridine-3'-phosphate
  modified_base 19: mod_base = OTHER; note = adenosine-3'-phosphate
  misc_feature 1..19: note = RNA
  misc_feature 20..21: note = DNA
gcaggaactcaataaagtatt

SEQ ID NO: 1958 - DNA, 21 bp, synthetic construct
  source 1..21: mol_type = other DNA
  modified_base 1: mod_base = OTHER; note = cytidine-3'-phosphate
  modified_base 2: mod_base = OTHER; note = adenosine-3'-phosphate
  modified_base 3: mod_base = OTHER; note = guanosine-3'-phosphate
  modified_base 4: mod_base = OTHER; note = guanosine-3'-phosphate
  modified_base 5: mod_base = OTHER; note = adenosine-3'-phosphate
  modified_base 6: mod_base = OTHER; note = adenosine-3'-phosphate
  modified_base 7: mod_base = OTHER; note = cytidine-3'-phosphate
  modified_base 8: mod_base = OTHER; note = uridine-3'-phosphate
  modified_base 9: mod_base = OTHER; note = cytidine-3'-phosphate
  modified_base 10: mod_base = OTHER; note = adenosine-3'-phosphate
  modified_base 11: mod_base = OTHER; note = adenosine-3'-phosphate
  modified_base 12: mod_base = OTHER; note = uridine-3'-phosphate
  modified_base 13: mod_base = OTHER; note = adenosine-3'-phosphate
  modified_base 14: mod_base = OTHER; note = adenosine-3'-phosphate
  modified_base 15: mod_base = OTHER; note = adenosine-3'-phosphate
  modified_base 16: mod_base = OTHER; note = guanosine-3'-phosphate
  modified_base 17: mod_base = OTHER; note = uridine-3'-phosphate
  modified_base 18: mod_base = OTHER; note = guanosine-3'-phosphate
  modified_base 19: mod_base = OTHER; note = adenosine-3'-phosphate
  misc_feature 1..19: note = RNA
  misc_feature 20..21: note = DNA
caggaactcaataaagtgatt

SEQ ID NO: 1959 - DNA, 21 bp, synthetic construct
  source 1..21: mol_type = other DNA
  modified_base 1: mod_base = OTHER; note = adenosine-3'-phosphate
  modified_base 2: mod_base = OTHER; note = guanosine-3'-phosphate
  modified_base 3: mod_base = OTHER; note = guanosine-3'-phosphate
  modified_base 4: mod_base = OTHER; note = adenosine-3'-phosphate
  modified_base 5: mod_base = OTHER; note = adenosine-3'-phosphate
  modified_base 6: mod_base = OTHER; note = cytidine-3'-phosphate
  modified_base 7: mod_base = OTHER; note = uridine-3'-phosphate
  modified_base 8: mod_base = OTHER; note = cytidine-3'-phosphate
  modified_base 9: mod_base = OTHER; note = adenosine-3'-phosphate
  modified_base 10: mod_base = OTHER; note = adenosine-3'-phosphate
  modified_base 11: mod_base = OTHER; note = uridine-3'-phosphate
  modified_base 12: mod_base = OTHER; note = adenosine-3'-phosphate
  modified_base 13: mod_base = OTHER; note = adenosine-3'-phosphate
  modified_base 14: mod_base = OTHER; note = adenosine-3'-phosphate
  modified_base 15: mod_base = OTHER; note = guanosine-3'-phosphate
  modified_base 16: mod_base = OTHER; note = uridine-3'-phosphate
  modified_base 17: mod_base = OTHER; note = guanosine-3'-phosphate
  modified_base 18: mod_base = OTHER; note = cytidine-3'-phosphate
  modified_base 19: mod_base = OTHER; note = uridine-3'-phosphate
  misc_feature 1..19: note = RNA
  misc_feature 20..21: note = DNA
aggaactcaataaagtgcttt

SEQ ID NO: 1960 - DNA, 21 bp, synthetic construct
  source 1..21: mol_type = other DNA
  modified_base 1: mod_base = OTHER; note = guanosine-3'-phosphate
  modified_base 2: mod_base = OTHER; note = guanosine-3'-phosphate
  modified_base 3: mod_base = OTHER; note = adenosine-3'-phosphate
  modified_base 4: mod_base = OTHER; note = adenosine-3'-phosphate
  modified_base 5: mod_base = OTHER; note = cytidine-3'-phosphate
  modified_base 6: mod_base = OTHER; note = uridine-3'-phosphate
  modified_base 7: mod_base = OTHER; note = cytidine-3'-phosphate
  modified_base 8: mod_base = OTHER; note = adenosine-3'-phosphate
  modified_base 9: mod_base = OTHER; note = adenosine-3'-phosphate
  modified_base 10: mod_base = OTHER; note = uridine-3'-phosphate
  modified_base 11: mod_base = OTHER; note = adenosine-3'-phosphate
  modified_base 12: mod_base = OTHER; note = adenosine-3'-phosphate
  modified_base 13: mod_base = OTHER; note = adenosine-3'-phosphate
  modified_base 14: mod_base = OTHER; note = guanosine-3'-phosphate
  modified_base 15: mod_base = OTHER; note = uridine-3'-phosphate
  modified_base 16: mod_base = OTHER; note = guanosine-3'-phosphate
  modified_base 17: mod_base = OTHER; note = cytidine-3'-phosphate
  modified_base 18: mod_base = OTHER; note = uridine-3'-phosphate
  modified_base 19: mod_base = OTHER; note = uridine-3'-phosphate
  misc_feature 1..19: note = RNA
  misc_feature 20..21: note = DNA
ggaactcaataaagtgctttt

SEQ ID NO: 1961 - DNA, 21 bp, synthetic construct
  source 1..21: mol_type = other DNA
  modified_base 1: mod_base = OTHER; note = guanosine-3'-phosphate
  modified_base 2: mod_base = OTHER; note = adenosine-3'-phosphate
  modified_base 3: mod_base = OTHER; note = adenosine-3'-phosphate
  modified_base 4: mod_base = OTHER; note = cytidine-3'-phosphate
  modified_base 5: mod_base = OTHER; note = uridine-3'-phosphate
  modified_base 6: mod_base = OTHER; note = cytidine-3'-phosphate
  modified_base 7: mod_base = OTHER; note = adenosine-3'-phosphate
  modified_base 8: mod_base = OTHER; note = adenosine-3'-phosphate
  modified_base 9: mod_base = OTHER; note = uridine-3'-phosphate
  modified_base 10: mod_base = OTHER; note = adenosine-3'-phosphate
  modified_base 11: mod_base = OTHER; note = adenosine-3'-phosphate
  modified_base 12: mod_base = OTHER; note = adenosine-3'-phosphate
  modified_base 13: mod_base = OTHER; note = guanosine-3'-phosphate
  modified_base 14: mod_base = OTHER; note = uridine-3'-phosphate
  modified_base 15: mod_base = OTHER; note = guanosine-3'-phosphate
  modified_base 16: mod_base = OTHER; note = cytidine-3'-phosphate
  modified_base 17: mod_base = OTHER; note = uridine-3'-phosphate
  modified_base 18: mod_base = OTHER; note = uridine-3'-phosphate
  modified_base 19: mod_base = OTHER; note = uridine-3'-phosphate
  misc_feature 1..19: note = RNA
  misc_feature 20..21: note = DNA
gaactcaataaagtgcttttt

SEQ ID NO: 1962 - DNA, 21 bp, synthetic construct
  source 1..21: mol_type = other DNA
  modified_base 1: mod_base = OTHER; note = adenosine-3'-phosphate
  modified_base 2: mod_base = OTHER; note = adenosine-3'-phosphate
  modified_base 3: mod_base = OTHER; note = cytidine-3'-phosphate
  modified_base 4: mod_base = OTHER; note = uridine-3'-phosphate
  modified_base 5: mod_base = OTHER; note = cytidine-3'-phosphate
  modified_base 6: mod_base = OTHER; note = adenosine-3'-phosphate
  modified_base 7: mod_base = OTHER; note = adenosine-3'-phosphate
  modified_base 8: mod_base = OTHER; note = uridine-3'-phosphate
  modified_base 9: mod_base = OTHER; note = adenosine-3'-phosphate
  modified_base 10: mod_base = OTHER; note = adenosine-3'-phosphate
  modified_base 11: mod_base = OTHER; note = adenosine-3'-phosphate
  modified_base 12: mod_base = OTHER; note = guanosine-3'-phosphate
  modified_base 13: mod_base = OTHER; note = uridine-3'-phosphate
  modified_base 14: mod_base = OTHER; note = guanosine-3'-phosphate
  modified_base 15: mod_base = OTHER; note = cytidine-3'-phosphate
  modified_base 16: mod_base = OTHER; note = uridine-3'-phosphate
  modified_base 17: mod_base = OTHER; note = uridine-3'-phosphate
  modified_base 18: mod_base = OTHER; note = uridine-3'-phosphate
  modified_base 19: mod_base = OTHER; note = adenosine-3'-phosphate
  misc_feature 1..19: note = RNA
  misc_feature 20..21: note = DNA
aactcaataaagtgctttatt

SEQ ID NO: 1963 - DNA, 21 bp, synthetic construct
  source 1..21: mol_type = other DNA
  modified_base 1: mod_base = OTHER; note = adenosine-3'-phosphate
  modified_base 2: mod_base = OTHER; note = cytidine-3'-phosphate
  modified_base 3: mod_base = OTHER; note = uridine-3'-phosphate
  modified_base 4: mod_base = OTHER; note = cytidine-3'-phosphate
  modified_base 5: mod_base = OTHER; note = adenosine-3'-phosphate
  modified_base 6: mod_base = OTHER; note = adenosine-3'-phosphate
  modified_base 7: mod_base = OTHER; note = uridine-3'-phosphate
  modified_base 8: mod_base = OTHER; note = adenosine-3'-phosphate
  modified_base 9: mod_base = OTHER; note = adenosine-3'-phosphate
  modified_base 10: mod_base = OTHER; note = adenosine-3'-phosphate
  modified_base 11: mod_base = OTHER; note = guanosine-3'-phosphate
  modified_base 12: mod_base = OTHER; note = uridine-3'-phosphate
  modified_base 13: mod_base = OTHER; note = guanosine-3'-phosphate
  modified_base 14: mod_base = OTHER; note = cytidine-3'-phosphate
  modified_base 15: mod_base = OTHER; note = uridine-3'-phosphate
  modified_base 16: mod_base = OTHER; note = uridine-3'-phosphate
  modified_base 17: mod_base = OTHER; note = uridine-3'-phosphate
  modified_base 18: mod_base = OTHER; note = guanosine-3'-phosphate
  modified_base 19: mod_base = OTHER; note = adenosine-3'-phosphate
  misc_feature 1..19: note = RNA
  misc_feature 20..21: note = DNA
actcaataaagtgctttgatt

SEQ ID NO: 1964 - DNA, 21 bp, synthetic construct
  source 1..21: mol_type = other DNA
  modified_base 1: mod_base = OTHER; note = uridine-3'-phosphate
  modified_base 2: mod_base = OTHER; note = cytidine-3'-phosphate
  modified_base 3: mod_base = OTHER; note = adenosine-3'-phosphate
  modified_base 4: mod_base = OTHER; note = adenosine-3'-phosphate
  modified_base 5: mod_base = OTHER; note = uridine-3'-phosphate
  modified_base 6: mod_base = OTHER; note = adenosine-3'-phosphate
  modified_base 7: mod_base = OTHER; note = adenosine-3'-phosphate
  modified_base 8: mod_base = OTHER; note = adenosine-3'-phosphate
  modified_base 9: mod_base = OTHER; note = guanosine-3'-phosphate
  modified_base 10: mod_base = OTHER; note = uridine-3'-phosphate
  modified_base 11: mod_base = OTHER; note = guanosine-3'-phosphate
  modified_base 12: mod_base = OTHER; note = cytidine-3'-phosphate
  modified_base 13: mod_base = OTHER; note = uridine-3'-phosphate
  modified_base 14: mod_base = OTHER; note = uridine-3'-phosphate
  modified_base 15: mod_base = OTHER; note = uridine-3'-phosphate
  modified_base 16: mod_base = OTHER; note = guanosine-3'-phosphate
  modified_base 17: mod_base = OTHER; note = adenosine-3'-phosphate
  modified_base 18: mod_base = OTHER; note = adenosine-3'-phosphate
  modified_base 19: mod_base = OTHER; note = adenosine-3'-phosphate
  misc_feature 1..19: note = RNA
  misc_feature 20..21: note = DNA
tcaataaagtgctttgaaatt

SEQ ID NO: 1965 - DNA, 21 bp, synthetic construct
  source 1..21: mol_type = other DNA
  modified_base 1: mod_base = OTHER; note = cytidine-3'-phosphate
  modified_base 2: mod_base = OTHER; note = adenosine-3'-phosphate
  modified_base 3: mod_base = OTHER; note = adenosine-3'-phosphate
  modified_base 4: mod_base = OTHER; note = uridine-3'-phosphate
  modified_base 5: mod_base = OTHER; note = adenosine-3'-phosphate
  modified_base 6: mod_base = OTHER; note = adenosine-3'-phosphate
  modified_base 7: mod_base = OTHER; note = adenosine-3'-phosphate
  modified_base 8: mod_base = OTHER; note = guanosine-3'-phosphate
  modified_base 9: mod_base = OTHER; note = uridine-3'-phosphate
  modified_base 10: mod_base = OTHER; note = guanosine-3'-phosphate
  modified_base 11: mod_base = OTHER; note = cytidine-3'-phosphate
  modified_base 12: mod_base = OTHER; note = uridine-3'-phosphate
  modified_base 13: mod_base = OTHER; note = uridine-3'-phosphate
  modified_base 14: mod_base = OTHER; note = uridine-3'-phosphate
  modified_base 15: mod_base = OTHER; note = guanosine-3'-phosphate
  modified_base 16: mod_base = OTHER; note = adenosine-3'-phosphate
  modified_base 17: mod_base = OTHER; note = adenosine-3'-phosphate
  modified_base 18: mod_base = OTHER; note = adenosine-3'-phosphate
  modified_base 19: mod_base = OTHER; note = adenosine-3'-phosphate
  misc_feature 1..19: note = RNA
  misc_feature 20..21: note = DNA
caataaagtgctttgaaaatt

SEQ ID NO: 1966 - DNA, 21 bp, synthetic construct
  source 1..21: mol_type = other DNA
  modified_base 1: mod_base = OTHER; note = adenosine-3'-phosphate
  modified_base 2: mod_base = OTHER; note = adenosine-3'-phosphate
  modified_base 3: mod_base = OTHER; note = uridine-3'-phosphate
  modified_base 4: mod_base = OTHER; note = adenosine-3'-phosphate
  modified_base 5: mod_base = OTHER; note = adenosine-3'-phosphate
  modified_base 6: mod_base = OTHER; note = adenosine-3'-phosphate
  modified_base 7: mod_base = OTHER; note = guanosine-3'-phosphate
  modified_base 8: mod_base = OTHER; note = uridine-3'-phosphate
  modified_base 9: mod_base = OTHER; note = guanosine-3'-phosphate
  modified_base 10: mod_base = OTHER; note = cytidine-3'-phosphate
  modified_base 11: mod_base = OTHER; note = uridine-3'-phosphate
  modified_base 12: mod_base = OTHER; note = uridine-3'-phosphate
  modified_base 13: mod_base = OTHER; note = uridine-3'-phosphate
  modified_base 14: mod_base = OTHER; note = guanosine-3'-phosphate
  modified_base 15: mod_base = OTHER; note = adenosine-3'-phosphate
  modified_base 16: mod_base = OTHER; note = adenosine-3'-phosphate
  modified_base 17: mod_base = OTHER; note = adenosine-3'-phosphate
  modified_base 18: mod_base = OTHER; note = adenosine-3'-phosphate
  modified_base 19: mod_base = OTHER; note = uridine-3'-phosphate
  misc_feature 1..19: note = RNA
  misc_feature 20..21: note = DNA
aataaagtgctttgaaaattt

SEQ ID NO: 1967 - DNA, 21 bp, synthetic construct
  source 1..21: mol_type = other DNA
  modified_base 1: mod_base = OTHER; note = adenosine-3'-phosphate
  modified_base 2: mod_base = OTHER; note = uridine-3'-phosphate
  modified_base 3: mod_base = OTHER; note = adenosine-3'-phosphate
  modified_base 4: mod_base = OTHER; note = adenosine-3'-phosphate
  modified_base 5: mod_base = OTHER; note = adenosine-3'-phosphate
  modified_base 6: mod_base = OTHER; note = guanosine-3'-phosphate
  modified_base 7: mod_base = OTHER; note = uridine-3'-phosphate
  modified_base 8: mod_base = OTHER; note = guanosine-3'-phosphate
  modified_base 9: mod_base = OTHER; note = cytidine-3'-phosphate
  modified_base 10: mod_base = OTHER; note = uridine-3'-phosphate
  modified_base 11: mod_base = OTHER; note = uridine-3'-phosphate
  modified_base 12: mod_base = OTHER; note = uridine-3'-phosphate
  modified_base 13: mod_base = OTHER; note = guanosine-3'-phosphate
  modified_base 14: mod_base = OTHER; note = adenosine-3'-phosphate
  modified_base 15: mod_base = OTHER; note = adenosine-3'-phosphate
  modified_base 16: mod_base = OTHER; note = adenosine-3'-phosphate
  modified_base 17: mod_base = OTHER; note = adenosine-3'-phosphate
  modified_base 18: mod_base = OTHER; note = uridine-3'-phosphate
  modified_base 19: mod_base = OTHER; note = adenosine-3'-phosphate
  misc_feature 1..19: note = RNA
  misc_feature 20..21: note = DNA
ataaagtgctttgaaaatatt

SEQ ID NO: 1968 - DNA, 21 bp, synthetic construct
  source 1..21: mol_type = other DNA
  modified_base 1: mod_base = OTHER; note = uridine-3'-phosphate
  modified_base 2: mod_base = OTHER; note = adenosine-3'-phosphate
  modified_base 3: mod_base = OTHER; note = adenosine-3'-phosphate
  modified_base 4: mod_base = OTHER; note = adenosine-3'-phosphate
  modified_base 5: mod_base = OTHER; note = guanosine-3'-phosphate
  modified_base 6: mod_base = OTHER; note = uridine-3'-phosphate
  modified_base 7: mod_base = OTHER; note = guanosine-3'-phosphate
  modified_base 8: mod_base = OTHER; note = cytidine-3'-phosphate
  modified_base 9: mod_base = OTHER; note = uridine-3'-phosphate
  modified_base 10: mod_base = OTHER; note = uridine-3'-phosphate
  modified_base 11: mod_base = OTHER; note = uridine-3'-phosphate
  modified_base 12: mod_base = OTHER; note = guanosine-3'-phosphate
  modified_base 13: mod_base = OTHER; note = adenosine-3'-phosphate
  modified_base 14: mod_base = OTHER; note = adenosine-3'-phosphate
  modified_base 15: mod_base = OTHER; note = adenosine-3'-phosphate
  modified_base 16: mod_base = OTHER; note = adenosine-3'-phosphate
  modified_base 17: mod_base = OTHER; note = uridine-3'-phosphate
  modified_base 18: mod_base = OTHER; note = guanosine-3'-phosphate
  modified_base 19: mod_base = OTHER; note = adenosine-3'-phosphate
  misc_feature 1..19: note = RNA
  misc_feature 20..21: note = DNA
taaagtgctttgaaaatgatt

SEQ ID NO: 1969 - DNA, 21 bp, synthetic construct
  source 1..21: mol_type = other DNA
  modified_base 1: mod_base = OTHER; note = adenosine-3'-phosphate
  modified_base 2: mod_base = OTHER; note = adenosine-3'-phosphate
  modified_base 3: mod_base = OTHER; note = adenosine-3'-phosphate
  modified_base 4: mod_base = OTHER; note = guanosine-3'-phosphate
  modified_base 5: mod_base = OTHER; note = uridine-3'-phosphate
  modified_base 6: mod_base = OTHER; note = guanosine-3'-phosphate
  modified_base 7: mod_base = OTHER; note = cytidine-3'-phosphate
  modified_base 8: mod_base = OTHER; note = uridine-3'-phosphate
  modified_base 9: mod_base = OTHER; note = uridine-3'-phosphate
  modified_base 10: mod_base = OTHER; note = uridine-3'-phosphate
  modified_base 11: mod_base = OTHER; note = guanosine-3'-phosphate
  modified_base 12: mod_base = OTHER; note = adenosine-3'-phosphate
  modified_base 13: mod_base = OTHER; note = adenosine-3'-phosphate
  modified_base 14: mod_base = OTHER; note = adenosine-3'-phosphate
  modified_base 15: mod_base = OTHER; note = adenosine-3'-phosphate
  modified_base 16: mod_base = OTHER; note = uridine-3'-phosphate
  modified_base 17: mod_base = OTHER; note = guanosine-3'-phosphate
  modified_base 18: mod_base = OTHER; note = cytidine-3'-phosphate
  modified_base 19: mod_base = OTHER; note = uridine-3'-phosphate
  misc_feature 1..19: note = RNA
  misc_feature 20..21: note = DNA
aaagtgctttgaaaatgcttt

SEQ ID NO: 1970 - DNA, 21 bp, synthetic construct
  source 1..21: mol_type = other DNA
  modified_base 1: mod_base = OTHER; note = adenosine-3'-phosphate
  modified_base 2: mod_base = OTHER; note = adenosine-3'-phosphate
  modified_base 3: mod_base = OTHER; note = guanosine-3'-phosphate
  modified_base 4: mod_base = OTHER; note = uridine-3'-phosphate
  modified_base 5: mod_base = OTHER; note = guanosine-3'-phosphate
  modified_base 6: mod_base = OTHER; note = cytidine-3'-phosphate
  modified_base 7: mod_base = OTHER; note = uridine-3'-phosphate
  modified_base 8: mod_base = OTHER; note = uridine-3'-phosphate
  modified_base 9: mod_base = OTHER; note = uridine-3'-phosphate
  modified_base 10: mod_base = OTHER; note = guanosine-3'-phosphate
  modified_base 11: mod_base = OTHER; note = adenosine-3'-phosphate
  modified_base 12: mod_base = OTHER; note = adenosine-3'-phosphate
  modified_base 13: mod_base = OTHER; note = adenosine-3'-phosphate
  modified_base 14: mod_base = OTHER; note = adenosine-3'-phosphate
  modified_base 15: mod_base = OTHER; note = uridine-3'-phosphate
  modified_base 16: mod_base = OTHER; note = guanosine-3'-phosphate
  modified_base 17: mod_base = OTHER; note = cytidine-3'-phosphate
  modified_base 18: mod_base = OTHER; note = uridine-3'-phosphate
  modified_base 19: mod_base = OTHER; note = adenosine-3'-phosphate
  misc_feature 1..19: note = RNA
  misc_feature 20..21: note = DNA
aagtgctttgaaaatgctatt

SEQ ID NO: 1971 - DNA, 21 bp, synthetic construct
  source 1..21: mol_type = other DNA
  modified_base 1: mod_base = OTHER; note = adenosine-3'-phosphate
  modified_base 2: mod_base = OTHER; note = guanosine-3'-phosphate
  modified_base 3: mod_base = OTHER; note = uridine-3'-phosphate
  modified_base 4: mod_base = OTHER; note = guanosine-3'-phosphate
  modified_base 5: mod_base = OTHER; note = cytidine-3'-phosphate
  modified_base 6: mod_base = OTHER; note = uridine-3'-phosphate
  modified_base 7: mod_base = OTHER; note = uridine-3'-phosphate
  modified_base 8: mod_base = OTHER; note = uridine-3'-phosphate
  modified_base 9: mod_base = OTHER; note = guanosine-3'-phosphate
  modified_base 10: mod_base = OTHER; note = adenosine-3'-phosphate
  modified_base 11: mod_base = OTHER; note = adenosine-3'-phosphate
  modified_base 12: mod_base = OTHER; note = adenosine-3'-phosphate
  modified_base 13: mod_base = OTHER; note = adenosine-3'-phosphate
  modified_base 14: mod_base = OTHER; note = uridine-3'-phosphate
  modified_base 15: mod_base = OTHER; note = guanosine-3'-phosphate
  modified_base 16: mod_base = OTHER; note = cytidine-3'-phosphate
  modified_base 17: mod_base = OTHER; note = uridine-3'-phosphate
  modified_base 18: mod_base = OTHER; note = guanosine-3'-phosphate
  modified_base 19: mod_base = OTHER; note = adenosine-3'-phosphate
  misc_feature 1..19: note = RNA
  misc_feature 20..21: note = DNA
agtgctttgaaaatgctgatt

SEQ ID NO: 1972 - DNA, 21 bp, synthetic construct
  source 1..21: mol_type = other DNA
  modified_base 1: mod_base = OTHER; note = guanosine-3'-phosphate
  modified_base 2: mod_base = OTHER; note = uridine-3'-phosphate
  modified_base 3: mod_base = OTHER; note = guanosine-3'-phosphate
  modified_base 4: mod_base = OTHER; note = cytidine-3'-phosphate
  modified_base 5: mod_base = OTHER; note = uridine-3'-phosphate
  modified_base 6: mod_base = OTHER; note = uridine-3'-phosphate
  modified_base 7: mod_base = OTHER; note = uridine-3'-phosphate
  modified_base 8: mod_base = OTHER; note = guanosine-3'-phosphate
  modified_base 9: mod_base = OTHER; note = adenosine-3'-phosphate
  modified_base 10: mod_base = OTHER; note = adenosine-3'-phosphate
  modified_base 11: mod_base = OTHER; note = adenosine-3'-phosphate
  modified_base 12: mod_base = OTHER; note = adenosine-3'-phosphate
  modified_base 13: mod_base = OTHER; note = uridine-3'-phosphate
  modified_base 14: mod_base = OTHER; note = guanosine-3'-phosphate
  modified_base 15: mod_base = OTHER; note = cytidine-3'-phosphate
  modified_base 16: mod_base = OTHER; note = uridine-3'-phosphate
  modified_base 17: mod_base = OTHER; note = guanosine-3'-phosphate
  modified_base 18: mod_base = OTHER; note = adenosine-3'-phosphate
  modified_base 19: mod_base = OTHER; note = adenosine-3'-phosphate
  misc_feature 1..19: note = RNA
  misc_feature 20..21: note = DNA
gtgctttgaaaatgctgaatt

SEQ ID NO: 1973 - DNA, 21 bp, synthetic construct
  source 1..21: mol_type = other DNA
  modified_base 1: mod_base = OTHER; note = uridine-3'-phosphate
  modified_base 2: mod_base = OTHER; note = guanosine-3'-phosphate
  modified_base 3: mod_base = OTHER; note = cytidine-3'-phosphate
  modified_base 4: mod_base = OTHER; note = uridine-3'-phosphate
  modified_base 5: mod_base = OTHER; note = uridine-3'-phosphate
  modified_base 6: mod_base = OTHER; note = uridine-3'-phosphate
  modified_base 7: mod_base = OTHER; note = guanosine-3'-phosphate
  modified_base 8: mod_base = OTHER; note = adenosine-3'-phosphate
  modified_base 9: mod_base = OTHER; note = adenosine-3'-phosphate
  modified_base 10: mod_base = OTHER; note = adenosine-3'-phosphate
  modified_base 11: mod_base = OTHER; note = adenosine-3'-phosphate
  modified_base 12: mod_base = OTHER; note = uridine-3'-phosphate
  modified_base 13: mod_base = OTHER; note = guanosine-3'-phosphate
  modified_base 14: mod_base = OTHER; note = cytidine-3'-phosphate
  modified_base 15: mod_base = OTHER; note = uridine-3'-phosphate
  modified_base 16: mod_base = OTHER; note = guanosine-3'-phosphate
  modified_base 17: mod_base = OTHER; note = adenosine-3'-phosphate
  modified_base 18: mod_base = OTHER; note = guanosine-3'-phosphate
  modified_base 19: mod_base = OTHER; note = adenosine-3'-phosphate
  misc_feature 1..19: note = RNA
  misc_feature 20..21: note = DNA
tgctttgaaaatgctgagatt

SEQ ID NO: 1974 - DNA, 21 bp, synthetic construct
  source 1..21: mol_type = other DNA
  modified_base 1: mod_base = OTHER; note = guanosine-3'-phosphate
  modified_base 2: mod_base = OTHER; note = cytidine-3'-phosphate
  modified_base 3: mod_base = OTHER; note = uridine-3'-phosphate
  modified_base 4: mod_base = OTHER; note = uridine-3'-phosphate
  modified_base 5: mod_base = OTHER; note = uridine-3'-phosphate
  modified_base 6: mod_base = OTHER; note = guanosine-3'-phosphate
  modified_base 7: mod_base = OTHER; note = adenosine-3'-phosphate
  modified_base 8: mod_base = OTHER; note = adenosine-3'-phosphate
  modified_base 9: mod_base = OTHER; note = adenosine-3'-phosphate
  modified_base 10: mod_base = OTHER; note = adenosine-3'-phosphate
  modified_base 11: mod_base = OTHER; note = uridine-3'-phosphate
  modified_base 12: mod_base = OTHER; note = guanosine-3'-phosphate
  modified_base 13: mod_base = OTHER; note = cytidine-3'-phosphate
  modified_base 14: mod_base = OTHER; note = uridine-3'-phosphate
  modified_base 15: mod_base = OTHER; note = guanosine-3'-phosphate
  modified_base 16: mod_base = OTHER; note = adenosine-3'-phosphate
  modified_base 17: mod_base = OTHER; note = guanosine-3'-phosphate
  modified_base 18: mod_base = OTHER; note = adenosine-3'-phosphate
  modified_base 19: mod_base = OTHER; note = adenosine-3'-phosphate
  misc_feature 1..19: note = RNA
  misc_feature 20..21: note = DNA
gctttgaaaatgctgagaatt

SEQ ID NO: 1975 - DNA, 21 bp, synthetic construct
  source 1..21: mol_type = other DNA
  modified_base 1: mod_base = OTHER; note = cytidine-3'-phosphate
  modified_base 2: mod_base = OTHER; note = uridine-3'-phosphate
  modified_base 3: mod_base = OTHER; note = uridine-3'-phosphate
  modified_base 4: mod_base = OTHER; note = uridine-3'-phosphate
  modified_base 5: mod_base = OTHER; note = guanosine-3'-phosphate
  modified_base 6: mod_base = OTHER; note = adenosine-3'-phosphate
  modified_base 7: mod_base = OTHER; note = adenosine-3'-phosphate
  modified_base 8: mod_base = OTHER; note = adenosine-3'-phosphate
  modified_base 9: mod_base = OTHER; note = adenosine-3'-phosphate
  modified_base 10: mod_base = OTHER; note = uridine-3'-phosphate
  modified_base 11: mod_base = OTHER; note = guanosine-3'-phosphate
  modified_base 12: mod_base = OTHER; note = cytidine-3'-phosphate
  modified_base 13: mod_base = OTHER; note = uridine-3'-phosphate
  modified_base 14: mod_base = OTHER; note = guanosine-3'-phosphate
  modified_base 15: mod_base = OTHER; note = adenosine-3'-phosphate
  modified_base 16: mod_base = OTHER; note = guanosine-3'-phosphate
  modified_base 17: mod_base = OTHER; note = adenosine-3'-phosphate
  modified_base 18: mod_base = OTHER; note = adenosine-3'-phosphate
  modified_base 19: mod_base = OTHER; note = adenosine-3'-phosphate
  misc_feature 1..19: note = RNA
  misc_feature 20..21: note = DNA
ctttgaaaatgctgagaaatt

SEQ ID NO: 1976 - DNA, 21 bp, synthetic construct
  source 1..21: mol_type = other DNA
  modified_base 1: mod_base = OTHER; note = uridine-3'-phosphate
  modified_base 2: mod_base = OTHER; note = uridine-3'-phosphate
  modified_base 3: mod_base = OTHER; note = uridine-3'-phosphate
  modified_base 4: mod_base = OTHER; note = guanosine-3'-phosphate
  modified_base 5: mod_base = OTHER; note = adenosine-3'-phosphate
  modified_base 6: mod_base = OTHER; note = adenosine-3'-phosphate
  modified_base 7: mod_base = OTHER; note = adenosine-3'-phosphate
  modified_base 8: mod_base = OTHER; note = adenosine-3'-phosphate
  modified_base 9: mod_base = OTHER; note = uridine-3'-phosphate
  modified_base 10: mod_base = OTHER; note = guanosine-3'-phosphate
  modified_base 11: mod_base = OTHER; note = cytidine-3'-phosphate
  modified_base 12: mod_base = OTHER; note = uridine-3'-phosphate
  modified_base 13: mod_base = OTHER; note = guanosine-3'-phosphate
  modified_base 14: mod_base = OTHER; note = adenosine-3'-phosphate
  modified_base 15: mod_base = OTHER; note = guanosine-3'-phosphate
  modified_base 16: mod_base = OTHER; note = adenosine-3'-phosphate
  modified_base 17: mod_base = OTHER; note = adenosine-3'-phosphate
  modified_base 18: mod_base = OTHER; note = adenosine-3'-phosphate
  modified_base 19: mod_base = OTHER; note = adenosine-3'-phosphate
  misc_feature 1..19: note = RNA
  misc_feature 20..21: note = DNA
tttgaaaatgctgagaaaatt

SEQ ID NO: 1977 - DNA, 21 bp, synthetic construct
  source 1..21: mol_type = other DNA
  modified_base 1: mod_base = OTHER; note = uridine-3'-phosphate
  modified_base 2: mod_base = OTHER; note = uridine-3'-phosphate
  modified_base 3: mod_base = OTHER; note = guanosine-3'-phosphate
  modified_base 4: mod_base = OTHER; note = adenosine-3'-phosphate
  modified_base 5: mod_base = OTHER; note = adenosine-3'-phosphate
  modified_base 6: mod_base = OTHER; note = adenosine-3'-phosphate
  modified_base 7: mod_base = OTHER; note = adenosine-3'-phosphate
  modified_base 8: mod_base = OTHER; note = uridine-3'-phosphate
  modified_base 9: mod_base = OTHER; note = guanosine-3'-phosphate
  modified_base 10: mod_base = OTHER; note = cytidine-3'-phosphate
  modified_base 11: mod_base = OTHER; note = uridine-3'-phosphate
  modified_base 12: mod_base = OTHER; note = guanosine-3'-phosphate
  modified_base 13: mod_base = OTHER; note = adenosine-3'-phosphate
  modified_base 14: mod_base = OTHER; note = guanosine-3'-phosphate
  modified_base 15: mod_base = OTHER; note = adenosine-3'-phosphate
  modified_base 16: mod_base = OTHER; note = adenosine-3'-phosphate
  modified_base 17: mod_base = OTHER; note = adenosine-3'-phosphate
  modified_base 18: mod_base = OTHER; note = adenosine-3'-phosphate
  modified_base 19: mod_base = OTHER; note = adenosine-3'-phosphate
  misc_feature 1..19: note = RNA
  misc_feature 20..21: note = DNA
ttgaaaatgctgagaaaaatt

SEQ ID NO: 1978 - DNA, 21 bp, synthetic construct
  source 1..21: mol_type = other DNA
  modified_base 1: mod_base = OTHER; note = uridine-3'-phosphate
  modified_base 2: mod_base = OTHER; note = guanosine-3'-phosphate
  modified_base 3: mod_base = OTHER; note = adenosine-3'-phosphate
  modified_base 4: mod_base = OTHER; note = adenosine-3'-phosphate
  modified_base 5: mod_base = OTHER; note = adenosine-3'-phosphate
  modified_base 6: mod_base = OTHER; note = adenosine-3'-phosphate
  modified_base 7: mod_base = OTHER; note = uridine-3'-phosphate
  modified_base 8: mod_base = OTHER; note = guanosine-3'-phosphate
  modified_base 9: mod_base = OTHER; note = cytidine-3'-phosphate
  modified_base 10: mod_base = OTHER; note = uridine-3'-phosphate
  modified_base 11: mod_base = OTHER; note = guanosine-3'-phosphate
  modified_base 12: mod_base = OTHER; note = adenosine-3'-phosphate
  modified_base 13: mod_base = OTHER; note = guanosine-3'-phosphate
  modified_base 14: mod_base = OTHER; note = adenosine-3'-phosphate
  modified_base 15: mod_base = OTHER; note = adenosine-3'-phosphate
  modified_base 16: mod_base = OTHER; note = adenosine-3'-phosphate
  modified_base 17: mod_base = OTHER; note = adenosine-3'-phosphate
  modified_base 18: mod_base = OTHER; note = adenosine-3'-phosphate
  modified_base 19: mod_base = OTHER; note = adenosine-3'-phosphate
  misc_feature 1..19: note = RNA
  misc_feature 20..21: note = DNA
tgaaaatgctgagaaaaaatt

SEQ ID NO: 1979 - DNA, 21 bp, synthetic construct
  source 1..21: mol_type = other DNA
  modified_base 1: mod_base = OTHER; note = guanosine-3'-phosphate
  modified_base 2: mod_base = OTHER; note = adenosine-3'-phosphate
  modified_base 3: mod_base = OTHER; note = adenosine-3'-phosphate
  modified_base 4: mod_base = OTHER; note = adenosine-3'-phosphate
  modified_base 5: mod_base = OTHER; note = adenosine-3'-phosphate
  modified_base 6: mod_base = OTHER; note = uridine-3'-phosphate
  modified_base 7: mod_base = OTHER; note = guanosine-3'-phosphate
  modified_base 8: mod_base = OTHER; note = cytidine-3'-phosphate
  modified_base 9: mod_base = OTHER; note = uridine-3'-phosphate
  modified_base 10: mod_base = OTHER; note = guanosine-3'-phosphate
  modified_base 11: mod_base = OTHER; note = adenosine-3'-phosphate
  modified_base 12: mod_base = OTHER; note = guanosine-3'-phosphate
  modified_base 13: mod_base = OTHER; note = adenosine-3'-phosphate
  modified_base 14: mod_base = OTHER; note = adenosine-3'-phosphate
  modified_base 15: mod_base = OTHER; note = adenosine-3'-phosphate
  modified_base 16: mod_base = OTHER; note = adenosine-3'-phosphate
  modified_base 17: mod_base = OTHER; note = adenosine-3'-phosphate
  modified_base 18: mod_base = OTHER; note = adenosine-3'-phosphate
  modified_base 19: mod_base = OTHER; note = adenosine-3'-phosphate
  misc_feature 1..19: note = RNA
  misc_feature 20..21: note = DNA
gaaaatgctgagaaaaaaatt

SEQ ID NO: 1980 - DNA, 21 bp, synthetic construct
  source 1..21: mol_type = other DNA
  modified_base 1: mod_base = OTHER; note = adenosine-3'-phosphate
  modified_base 2: mod_base = OTHER; note = adenosine-3'-phosphate
  modified_base 3: mod_base = OTHER; note = adenosine-3'-phosphate
  modified_base 4: mod_base = OTHER; note = adenosine-3'-phosphate
  modified_base 5: mod_base = OTHER; note = uridine-3'-phosphate
  modified_base 6: mod_base = OTHER; note = guanosine-3'-phosphate
  modified_base 7: mod_base = OTHER; note = cytidine-3'-phosphate
  modified_base 8: mod_base = OTHER; note = uridine-3'-phosphate
  modified_base 9: mod_base = OTHER; note = guanosine-3'-phosphate
  modified_base 10: mod_base = OTHER; note = adenosine-3'-phosphate
  modified_base 11: mod_base = OTHER; note = guanosine-3'-phosphate
  modified_base 12: mod_base = OTHER; note = adenosine-3'-phosphate
  modified_base 13: mod_base = OTHER; note = adenosine-3'-phosphate
  modified_base 14: mod_base = OTHER; note = adenosine-3'-phosphate
  modified_base 15: mod_base = OTHER; note = adenosine-3'-phosphate
  modified_base 16: mod_base = OTHER; note = adenosine-3'-phosphate
  modified_base 17: mod_base = OTHER; note = adenosine-3'-phosphate
  modified_base 18: mod_base = OTHER; note = adenosine-3'-phosphate
  modified_base 19: mod_base = OTHER; note = adenosine-3'-phosphate
  misc_feature 1..19: note = RNA
  misc_feature 20..21: note = DNA
aaaatgctgagaaaaaaaatt

SEQ ID NO: 1981 - DNA, 21 bp, synthetic construct
  source 1..21: mol_type = other DNA
  modified_base 1: mod_base = OTHER; note = adenosine-3'-phosphate
  modified_base 2: mod_base = OTHER; note = adenosine-3'-phosphate
  modified_base 3: mod_base = OTHER; note = adenosine-3'-phosphate
  modified_base 4: mod_base = OTHER; note = uridine-3'-phosphate
  modified_base 5: mod_base = OTHER; note = guanosine-3'-phosphate
  modified_base 6: mod_base = OTHER; note = cytidine-3'-phosphate
  modified_base 7: mod_base = OTHER; note = uridine-3'-phosphate
  modified_base 8: mod_base = OTHER; note = guanosine-3'-phosphate
  modified_base 9: mod_base = OTHER; note = adenosine-3'-phosphate
  modified_base 10: mod_base = OTHER; note = guanosine-3'-phosphate
  modified_base 11: mod_base = OTHER; note = adenosine-3'-phosphate
  modified_base 12: mod_base = OTHER; note = adenosine-3'-phosphate
  modified_base 13: mod_base = OTHER; note = adenosine-3'-phosphate
  modified_base 14: mod_base = OTHER; note = adenosine-3'-phosphate
  modified_base 15: mod_base = OTHER; note = adenosine-3'-phosphate
  modified_base 16: mod_base = OTHER; note = adenosine-3'-phosphate
  modified_base 17: mod_base = OTHER; note = adenosine-3'-phosphate
  modified_base 18: mod_base = OTHER; note = adenosine-3'-phosphate
  modified_base 19: mod_base = OTHER; note = adenosine-3'-phosphate
  misc_feature 1..19: note = RNA
  misc_feature 20..21: note = DNA
aaatgctgagaaaaaaaaatt

SEQ ID NO: 1982 - DNA, 21 bp, synthetic construct
  source 1..21: mol_type = other DNA
  modified_base 1: mod_base = OTHER; note = adenosine-3'-phosphate
  modified_base 2: mod_base = OTHER; note = adenosine-3'-phosphate
  modified_base 3: mod_base = OTHER; note = uridine-3'-phosphate
  modified_base 4: mod_base = OTHER; note = guanosine-3'-phosphate
  modified_base 5: mod_base = OTHER; note = cytidine-3'-phosphate
  modified_base 6: mod_base = OTHER; note = uridine-3'-phosphate
  modified_base 7: mod_base = OTHER; note = guanosine-3'-phosphate
  modified_base 8: mod_base = OTHER; note = adenosine-3'-phosphate
  modified_base 9: mod_base = OTHER; note = guanosine-3'-phosphate
  modified_base 10: mod_base = OTHER; note = adenosine-3'-phosphate
  modified_base 11: mod_base = OTHER; note = adenosine-3'-phosphate
  modified_base 12: mod_base = OTHER; note = adenosine-3'-phosphate
  modified_base 13: mod_base = OTHER; note = adenosine-3'-phosphate
  modified_base 14: mod_base = OTHER; note = adenosine-3'-phosphate
  modified_base 15: mod_base = OTHER; note = adenosine-3'-phosphate
  modified_base 16: mod_base = OTHER; note = adenosine-3'-phosphate
  modified_base 17: mod_base = OTHER; note = adenosine-3'-phosphate
  modified_base 18: mod_base = OTHER; note = adenosine-3'-phosphate
  modified_base 19: mod_base = OTHER; note = adenosine-3'-phosphate
  misc_feature 1..19: note = RNA
  misc_feature 20..21: note = DNA
aatgctgagaaaaaaaaaatt

SEQ ID NO: 1983 - DNA, 21 bp, synthetic construct
  source 1..21: mol_type = other DNA
  modified_base 1: mod_base = OTHER; note = adenosine-3'-phosphate
  modified_base 2: mod_base = OTHER; note = uridine-3'-phosphate
  modified_base 3: mod_base = OTHER; note = guanosine-3'-phosphate
  modified_base 4: mod_base = OTHER; note = cytidine-3'-phosphate
  modified_base 5: mod_base = OTHER; note = uridine-3'-phosphate
  modified_base 6: mod_base = OTHER; note = guanosine-3'-phosphate
  modified_base 7: mod_base = OTHER; note = adenosine-3'-phosphate
  modified_base 8: mod_base = OTHER; note = guanosine-3'-phosphate
  modified_base 9: mod_base = OTHER; note = adenosine-3'-phosphate
  modified_base 10: mod_base = OTHER; note = adenosine-3'-phosphate
  modified_base 11: mod_base = OTHER; note = adenosine-3'-phosphate
  modified_base 12: mod_base = OTHER; note = adenosine-3'-phosphate
  modified_base 13: mod_base = OTHER; note = adenosine-3'-phosphate
  modified_base 14: mod_base = OTHER; note = adenosine-3'-phosphate
  modified_base 15: mod_base = OTHER; note = adenosine-3'-phosphate
  modified_base 16: mod_base = OTHER; note = adenosine-3'-phosphate
  modified_base 17: mod_base = OTHER; note = adenosine-3'-phosphate
  modified_base 18: mod_base = OTHER; note = adenosine-3'-phosphate
  modified_base 19: mod_base = OTHER; note = adenosine-3'-phosphate
  misc_feature 1..19: note = RNA
  misc_feature 20..21: note = DNA
atgctgagaaaaaaaaaaatt

SEQ ID NO: 1984 - DNA, 21 bp, synthetic construct
  source 1..21: mol_type = other DNA
  modified_base 1: mod_base = OTHER; note = uridine-3'-phosphate
  modified_base 2: mod_base = OTHER; note = uridine-3'-phosphate
  modified_base 3: mod_base = OTHER; note = uridine-3'-phosphate
  modified_base 4: mod_base = OTHER; note = cytidine-3'-phosphate
  modified_base 5: mod_base = OTHER; note = cytidine-3'-phosphate
  modified_base 6: mod_base = OTHER; note = uridine-3'-phosphate
  modified_base 7: mod_base = OTHER; note = guanosine-3'-phosphate
  modified_base 8: mod_base = OTHER; note = cytidine-3'-phosphate
  modified_base 9: mod_base = OTHER; note = guanosine-3'-phosphate
  modified_base 10: mod_base = OTHER; note = cytidine-3'-phosphate
  modified_base 11: mod_base = OTHER; note = cytidine-3'-phosphate
  modified_base 12: mod_base = OTHER; note = adenosine-3'-phosphate
  modified_base 13: mod_base = OTHER; note = uridine-3'-phosphate
  modified_base 14: mod_base = OTHER; note = cytidine-3'-phosphate
  modified_base 15: mod_base = OTHER; note = cytidine-3'-phosphate
  modified_base 16: mod_base = OTHER; note = uridine-3'-phosphate
  modified_base 17: mod_base = OTHER; note = guanosine-3'-phosphate
  modified_base 18: mod_base = OTHER; note = guanosine-3'-phosphate
  modified_base 19: mod_base = OTHER; note = cytidine-3'-phosphate
  misc_feature 1..19: note = RNA
  misc_feature 20..21: note = DNA
tttcctgcgccatcctggctt

SEQ ID NO: 1985 - DNA, 21 bp, synthetic construct
  source 1..21: mol_type = other DNA
  modified_base 1: mod_base = OTHER; note = adenosine-3'-phosphate
  modified_base 2: mod_base = OTHER; note = guanosine-3'-phosphate
  modified_base 3: mod_base = OTHER; note = uridine-3'-phosphate
  modified_base 4: mod_base = OTHER; note = uridine-3'-phosphate
  modified_base 5: mod_base = OTHER; note = cytidine-3'-phosphate
  modified_base 6: mod_base = OTHER; note = cytidine-3'-phosphate
  modified_base 7: mod_base = OTHER; note = uridine-3'-phosphate
  modified_base 8: mod_base = OTHER; note = guanosine-3'-phosphate
  modified_base 9: mod_base = OTHER; note = cytidine-3'-phosphate
  modified_base 10: mod_base = OTHER; note = guanosine-3'-phosphate
  modified_base 11: mod_base = OTHER; note = cytidine-3'-phosphate
  modified_base 12: mod_base = OTHER; note = cytidine-3'-phosphate
  modified_base 13: mod_base = OTHER; note = adenosine-3'-phosphate
  modified_base 14: mod_base = OTHER; note = uridine-3'-phosphate
  modified_base 15: mod_base = OTHER; note = cytidine-3'-phosphate
  modified_base 16: mod_base = OTHER; note = cytidine-3'-phosphate
  modified_base 17: mod_base = OTHER; note = uridine-3'-phosphate
  modified_base 18: mod_base = OTHER; note = guanosine-3'-phosphate
  modified_base 19: mod_base = OTHER; note = guanosine-3'-phosphate
  misc_feature 1..19: note = RNA
  misc_feature 20..21: note = DNA
agttcctgcgccatcctggtt

SEQ ID NO: 1986 - DNA, 21 bp, synthetic construct
  source 1..21: mol_type = other DNA
  modified_base 1: mod_base = OTHER; note = uridine-3'-phosphate
  modified_base 2: mod_base = OTHER; note = adenosine-3'-phosphate
  modified_base 3: mod_base = OTHER; note = guanosine-3'-phosphate
  modified_base 4: mod_base = OTHER; note = uridine-3'-phosphate
  modified_base 5: mod_base = OTHER; note = uridine-3'-phosphate
  modified_base 6: mod_base = OTHER; note = cytidine-3'-phosphate
  modified_base 7: mod_base = OTHER; note = cytidine-3'-phosphate
  modified_base 8: mod_base = OTHER; note = uridine-3'-phosphate
  modified_base 9: mod_base = OTHER; note = guanosine-3'-phosphate
  modified_base 10: mod_base = OTHER; note = cytidine-3'-phosphate
  modified_base 11: mod_base = OTHER; note = guanosine-3'-phosphate
  modified_base 12: mod_base = OTHER; note = cytidine-3'-phosphate
  modified_base 13: mod_base = OTHER; note = cytidine-3'-phosphate
  modified_base 14: mod_base = OTHER; note = adenosine-3'-phosphate
  modified_base 15: mod_base = OTHER; note = uridine-3'-phosphate
  modified_base 16: mod_base = OTHER; note = cytidine-3'-phosphate
  modified_base 17: mod_base = OTHER; note = cytidine-3'-phosphate
  modified_base 18: mod_base = OTHER; note = uridine-3'-phosphate
  modified_base 19: mod_base = OTHER; note = guanosine-3'-phosphate
  misc_feature 1..19: note = RNA
  misc_feature 20..21: note = DNA
tagttcctgcgccatcctgtt

SEQ ID NO: 1987 - DNA, 21 bp, synthetic construct
  source 1..21: mol_type = other DNA
  modified_base 1: mod_base = OTHER; note = uridine-3'-phosphate
  modified_base 2: mod_base = OTHER; note = guanosine-3'-phosphate
  modified_base 3: mod_base = OTHER; note = adenosine-3'-phosphate
  modified_base 4: mod_base = OTHER; note = guanosine-3'-phosphate
  modified_base 5: mod_base = OTHER; note = uridine-3'-phosphate
  modified_base 6: mod_base = OTHER; note = uridine-3'-phosphate
  modified_base 7: mod_base = OTHER; note = cytidine-3'-phosphate
  modified_base 8: mod_base = OTHER; note = cytidine-3'-phosphate
  modified_base 9: mod_base = OTHER; note = uridine-3'-phosphate
  modified_base 10: mod_base = OTHER; note = guanosine-3'-phosphate
  modified_base 11: mod_base = OTHER; note = cytidine-3'-phosphate
  modified_base 12: mod_base = OTHER; note = guanosine-3'-phosphate
  modified_base 13: mod_base = OTHER; note = cytidine-3'-phosphate
  modified_base 14: mod_base = OTHER; note = cytidine-3'-phosphate
  modified_base 15: mod_base = OTHER; note = adenosine-3'-phosphate
  modified_base 16: mod_base = OTHER; note = uridine-3'-phosphate
  modified_base 17: mod_base = OTHER; note = cytidine-3'-phosphate
  modified_base 18: mod_base = OTHER; note = cytidine-3'-phosphate
  modified_base 19: mod_base = OTHER; note = uridine-3'-phosphate
  misc_feature 1..19: note = RNA
  misc_feature 20..21: note = DNA
tgagttcctgcgccatccttt

SEQ ID NO: 1988 - DNA, 21 bp, synthetic construct
  source 1..21: mol_type = other DNA
  modified_base 1: mod_base = OTHER; note = uridine-3'-phosphate
  modified_base 2: mod_base = OTHER; note = uridine-3'-phosphate
  modified_base 3: mod_base = OTHER; note = guanosine-3'-phosphate
  modified_base 4: mod_base = OTHER; note = adenosine-3'-phosphate
  modified_base 5: mod_base = OTHER; note = guanosine-3'-phosphate
  modified_base 6: mod_base = OTHER; note = uridine-3'-phosphate
  modified_base 7: mod_base = OTHER; note = uridine-3'-phosphate
  modified_base 8: mod_base = OTHER; note = cytidine-3'-phosphate
  modified_base 9: mod_base = OTHER; note = cytidine-3'-phosphate
  modified_base 10: mod_base = OTHER; note = uridine-3'-phosphate
  modified_base 11: mod_base = OTHER; note = guanosine-3'-phosphate
  modified_base 12: mod_base = OTHER; note = cytidine-3'-phosphate
  modified_base 13: mod_base = OTHER; note = guanosine-3'-phosphate
  modified_base 14: mod_base = OTHER; note = cytidine-3'-phosphate
  modified_base 15: mod_base = OTHER; note = cytidine-3'-phosphate
  modified_base 16: mod_base = OTHER; note = adenosine-3'-phosphate
  modified_base 17: mod_base = OTHER; note = uridine-3'-phosphate
  modified_base 18: mod_base = OTHER; note = cytidine-3'-phosphate
  modified_base 19: mod_base = OTHER; note = cytidine-3'-phosphate
  misc_feature 1..19: note = RNA
  misc_feature 20..21: note = DNA
ttgagttcctgcgccatcctt

SEQ ID NO: 1989 - DNA, 21 bp, synthetic construct
  source 1..21: mol_type = other DNA
  modified_base 1: mod_base = OTHER; note = adenosine-3'-phosphate
  modified_base 2: mod_base = OTHER; note = uridine-3'-phosphate
  modified_base 3: mod_base = OTHER; note = uridine-3'-phosphate
  modified_base 4: mod_base = OTHER; note = guanosine-3'-phosphate
  modified_base 5: mod_base = OTHER; note = adenosine-3'-phosphate
  modified_base 6: mod_base = OTHER; note = guanosine-3'-phosphate
  modified_base 7: mod_base = OTHER; note = uridine-3'-phosphate
  modified_base 8: mod_base = OTHER; note = uridine-3'-phosphate
  modified_base 9: mod_base = OTHER; note = cytidine-3'-phosphate
  modified_base 10: mod_base = OTHER; note = cytidine-3'-phosphate
  modified_base 11: mod_base = OTHER; note = uridine-3'-phosphate
  modified_base 12: mod_base = OTHER; note = guanosine-3'-phosphate
  modified_base 13: mod_base = OTHER; note = cytidine-3'-phosphate
  modified_base 14: mod_base = OTHER; note = guanosine-3'-phosphate
  modified_base 15: mod_base = OTHER; note = cytidine-3'-phosphate
  modified_base 16: mod_base = OTHER; note = cytidine-3'-phosphate
  modified_base 17: mod_base = OTHER; note = adenosine-3'-phosphate
  modified_base 18: mod_base = OTHER; note = uridine-3'-phosphate
  modified_base 19: mod_base = OTHER; note = cytidine-3'-phosphate
  misc_feature 1..19: note = RNA
  misc_feature 20..21: note = DNA
attgagttcctgcgccatctt

SEQ ID NO: 1990 - DNA, 21 bp, synthetic construct
  source 1..21: mol_type = other DNA
  modified_base 1: mod_base = OTHER; note = uridine-3'-phosphate
  modified_base 2: mod_base = OTHER; note = adenosine-3'-phosphate
  modified_base 3: mod_base = OTHER; note = uridine-3'-phosphate
  modified_base 4: mod_base = OTHER; note = uridine-3'-phosphate
  modified_base 5: mod_base = OTHER; note = guanosine-3'-phosphate
  modified_base 6: mod_base = OTHER; note = adenosine-3'-phosphate
  modified_base 7: mod_base = OTHER; note = guanosine-3'-phosphate
  modified_base 8: mod_base = OTHER; note = uridine-3'-phosphate
  modified_base 9: mod_base = OTHER; note = uridine-3'-phosphate
  modified_base 10: mod_base = OTHER; note = cytidine-3'-phosphate
  modified_base 11: mod_base = OTHER; note = cytidine-3'-phosphate
  modified_base 12: mod_base = OTHER; note = uridine-3'-phosphate
  modified_base 13: mod_base = OTHER; note = guanosine-3'-phosphate
  modified_base 14: mod_base = OTHER; note = cytidine-3'-phosphate
  modified_base 15: mod_base = OTHER; note = guanosine-3'-phosphate
  modified_base 16: mod_base = OTHER; note = cytidine-3'-phosphate
  modified_base 17: mod_base = OTHER; note = cytidine-3'-phosphate
  modified_base 18: mod_base = OTHER; note = adenosine-3'-phosphate
  modified_base 19: mod_base = OTHER; note = uridine-3'-phosphate
  misc_feature 1..19: note = RNA
  misc_feature 20..21: note = DNA
tattgagttcctgcgccattt

SEQ ID NO: 1991 - DNA, 21 bp, synthetic construct
  source 1..21: mol_type = other DNA
  modified_base 1: mod_base = OTHER; note = uridine-3'-phosphate
  modified_base 2: mod_base = OTHER; note = uridine-3'-phosphate
  modified_base 3: mod_base = OTHER; note = adenosine-3'-phosphate
  modified_base 4: mod_base = OTHER; note = uridine-3'-phosphate
  modified_base 5: mod_base = OTHER; note = uridine-3'-phosphate
  modified_base 6: mod_base = OTHER; note = guanosine-3'-phosphate
  modified_base 7: mod_base = OTHER; note = adenosine-3'-phosphate
  modified_base 8: mod_base = OTHER; note = guanosine-3'-phosphate
  modified_base 9: mod_base = OTHER; note = uridine-3'-phosphate
  modified_base 10: mod_base = OTHER; note = uridine-3'-phosphate
  modified_base 11: mod_base = OTHER; note = cytidine-3'-phosphate
  modified_base 12: mod_base = OTHER; note = cytidine-3'-phosphate
  modified_base 13: mod_base = OTHER; note = uridine-3'-phosphate
  modified_base 14: mod_base = OTHER; note = guanosine-3'-phosphate
  modified_base 15: mod_base = OTHER; note = cytidine-3'-phosphate
  modified_base 16: mod_base = OTHER; note = guanosine-3'-phosphate
  modified_base 17: mod_base = OTHER; note = cytidine-3'-phosphate
  modified_base 18: mod_base = OTHER; note = cytidine-3'-phosphate
  modified_base 19: mod_base = OTHER; note = adenosine-3'-phosphate
  misc_feature 1..19: note = RNA
  misc_feature 20..21: note = DNA
ttattgagttcctgcgccatt

SEQ ID NO: 1992 - DNA, 21 bp, synthetic construct
  source 1..21: mol_type = other DNA
  modified_base 1: mod_base = OTHER; note = uridine-3'-phosphate
  modified_base 2: mod_base = OTHER; note = uridine-3'-phosphate
  modified_base 3: mod_base = OTHER; note = uridine-3'-phosphate
  modified_base 4: mod_base = OTHER; note = adenosine-3'-phosphate
  modified_base 5: mod_base = OTHER; note = uridine-3'-phosphate
  modified_base 6: mod_base = OTHER; note = uridine-3'-phosphate
  modified_base 7: mod_base = OTHER; note = guanosine-3'-phosphate
  modified_base 8: mod_base = OTHER; note = adenosine-3'-phosphate
  modified_base 9: mod_base = OTHER; note = guanosine-3'-phosphate
  modified_base 10: mod_base = OTHER; note = uridine-3'-phosphate
  modified_base 11: mod_base = OTHER; note = uridine-3'-phosphate
  modified_base 12: mod_base = OTHER; note = cytidine-3'-phosphate
  modified_base 13: mod_base = OTHER; note = cytidine-3'-phosphate
  modified_base 14: mod_base = OTHER; note = uridine-3'-phosphate
  modified_base 15: mod_base = OTHER; note = guanosine-3'-phosphate
  modified_base 16: mod_base = OTHER; note = cytidine-3'-phosphate
  modified_base 17: mod_base = OTHER; note = guanosine-3'-phosphate
  modified_base 18: mod_base = OTHER; note = cytidine-3'-phosphate
  modified_base 19: mod_base = OTHER; note = cytidine-3'-phosphate
  misc_feature 1..19: note = RNA
  misc_feature 20..21: note = DNA
tttattgagttcctgcgcctt

SEQ ID NO: 1993 - DNA, 21 bp, synthetic construct
  source 1..21: mol_type = other DNA
  modified_base 1: mod_base = OTHER; note = uridine-3'-phosphate
  modified_base 2: mod_base = OTHER; note = uridine-3'-phosphate
  modified_base 3: mod_base = OTHER; note = uridine-3'-phosphate
  modified_base 4: mod_base = OTHER; note = uridine-3'-phosphate
  modified_base 5: mod_base = OTHER; note = adenosine-3'-phosphate
  modified_base 6: mod_base = OTHER; note = uridine-3'-phosphate
  modified_base 7: mod_base = OTHER; note = uridine-3'-phosphate
  modified_base 8: mod_base = OTHER; note = guanosine-3'-phosphate
  modified_base 9: mod_base = OTHER; note = adenosine-3'-phosphate
  modified_base 10: mod_base = OTHER; note = guanosine-3'-phosphate
  modified_base 11: mod_base = OTHER; note = uridine-3'-phosphate
  modified_base 12: mod_base = OTHER; note = uridine-3'-phosphate
  modified_base 13: mod_base = OTHER; note = cytidine-3'-phosphate
  modified_base 14: mod_base = OTHER; note = cytidine-3'-phosphate
  modified_base 15: mod_base = OTHER; note = uridine-3'-phosphate
  modified_base 16: mod_base = OTHER; note = guanosine-3'-phosphate
  modified_base 17: mod_base = OTHER; note = cytidine-3'-phosphate
  modified_base 18: mod_base = OTHER; note = guanosine-3'-phosphate
  modified_base 19: mod_base = OTHER; note = cytidine-3'-phosphate
  misc_feature 1..19: note = RNA
  misc_feature 20..21: note = DNA
ttttattgagttcctgcgctt

SEQ ID NO: 1994 - DNA, 21 bp, synthetic construct
  source 1..21: mol_type = other DNA
  modified_base 1: mod_base = OTHER; note = adenosine-3'-phosphate
  modified_base 2: mod_base = OTHER; note = cytidine-3'-phosphate
  modified_base 3: mod_base = OTHER; note = uridine-3'-phosphate
  modified_base 4: mod_base = OTHER; note = uridine-3'-phosphate
  modified_base 5: mod_base = OTHER; note = uridine-3'-phosphate
  modified_base 6: mod_base = OTHER; note = adenosine-3'-phosphate
  modified_base 7: mod_base = OTHER; note = uridine-3'-phosphate
  modified_base 8: mod_base = OTHER; note = uridine-3'-phosphate
  modified_base 9: mod_base = OTHER; note = guanosine-3'-phosphate
  modified_base 10: mod_base = OTHER; note = adenosine-3'-phosphate
  modified_base 11: mod_base = OTHER; note = guanosine-3'-phosphate
  modified_base 12: mod_base = OTHER; note = uridine-3'-phosphate
  modified_base 13: mod_base = OTHER; note = uridine-3'-phosphate
  modified_base 14: mod_base = OTHER; note = cytidine-3'-phosphate
  modified_base 15: mod_base = OTHER; note = cytidine-3'-phosphate
  modified_base 16: mod_base = OTHER; note = uridine-3'-phosphate
  modified_base 17: mod_base = OTHER; note = guanosine-3'-phosphate
  modified_base 18: mod_base = OTHER; note = cytidine-3'-phosphate
  modified_base 19: mod_base = OTHER; note = guanosine-3'-phosphate
  misc_feature 1..19: note = RNA
  misc_feature 20..21: note = DNA
actttattgagttcctgcgtt

SEQ ID NO: 1995 - DNA, 21 bp, synthetic construct
  source 1..21: mol_type = other DNA
  modified_base 1: mod_base = OTHER; note = uridine-3'-phosphate
  modified_base 2: mod_base = OTHER; note = adenosine-3'-phosphate
  modified_base 3: mod_base = OTHER; note = cytidine-3'-phosphate
  modified_base 4: mod_base = OTHER; note = uridine-3'-phosphate
  modified_base 5: mod_base = OTHER; note = uridine-3'-phosphate
  modified_base 6: mod_base = OTHER; note = uridine-3'-phosphate
  modified_base 7: mod_base = OTHER; note = adenosine-3'-phosphate
  modified_base 8: mod_base = OTHER; note = uridine-3'-phosphate
  modified_base 9: mod_base = OTHER; note = uridine-3'-phosphate
  modified_base 10: mod_base = OTHER; note = guanosine-3'-phosphate
  modified_base 11: mod_base = OTHER; note = adenosine-3'-phosphate
  modified_base 12: mod_base = OTHER; note = guanosine-3'-phosphate
  modified_base 13: mod_base = OTHER; note = uridine-3'-phosphate
  modified_base 14: mod_base = OTHER; note = uridine-3'-phosphate
  modified_base 15: mod_base = OTHER; note = cytidine-3'-phosphate
  modified_base 16: mod_base = OTHER; note = cytidine-3'-phosphate
  modified_base 17: mod_base = OTHER; note = uridine-3'-phosphate
  modified_base 18: mod_base = OTHER; note = guanosine-3'-phosphate
  modified_base 19: mod_base = OTHER; note = cytidine-3'-phosphate
  misc_feature 1..19: note = RNA
  misc_feature 20..21: note = DNA
tactttattgagttcctgctt

SEQ ID NO: 1996 - DNA, 21 bp, synthetic construct
  source 1..21: mol_type = other DNA
  modified_base 1: mod_base = OTHER; note = uridine-3'-phosphate
  modified_base 2: mod_base = OTHER; note = cytidine-3'-phosphate
  modified_base 3: mod_base = OTHER; note = adenosine-3'-phosphate
  modified_base 4: mod_base = OTHER; note = cytidine-3'-phosphate
  modified_base 5: mod_base = OTHER; note = uridine-3'-phosphate
  modified_base 6: mod_base = OTHER; note = uridine-3'-phosphate
  modified_base 7: mod_base = OTHER; note = uridine-3'-phosphate
  modified_base 8: mod_base = OTHER; note = adenosine-3'-phosphate
  modified_base 9: mod_base = OTHER; note = uridine-3'-phosphate
  modified_base 10: mod_base = OTHER; note = uridine-3'-phosphate
  modified_base 11: mod_base = OTHER; note = guanosine-3'-phosphate
  modified_base 12: mod_base = OTHER; note = adenosine-3'-phosphate
  modified_base 13: mod_base = OTHER; note = guanosine-3'-phosphate
  modified_base 14: mod_base = OTHER; note = uridine-3'-phosphate
  modified_base 15: mod_base = OTHER; note = uridine-3'-phosphate
  modified_base 16: mod_base = OTHER; note = cytidine-3'-phosphate
  modified_base 17: mod_base = OTHER; note = cytidine-3'-phosphate
  modified_base 18: mod_base = OTHER; note = uridine-3'-phosphate
  modified_base 19: mod_base = OTHER; note = guanosine-3'-phosphate
  misc_feature 1..19: note = RNA
  misc_feature 20..21: note = DNA
tcactttattgagttcctgtt

SEQ ID NO: 1997 - DNA, 21 bp, synthetic construct
  source 1..21: mol_type = other DNA
  modified_base 1: mod_base = OTHER; note = adenosine-3'-phosphate
  modified_base 2: mod_base = OTHER; note = guanosine-3'-phosphate
  modified_base 3: mod_base = OTHER; note = cytidine-3'-phosphate
  modified_base 4: mod_base = OTHER; note = adenosine-3'-phosphate
  modified_base 5: mod_base = OTHER; note = cytidine-3'-phosphate
  modified_base 6: mod_base = OTHER; note = uridine-3'-phosphate
  modified_base 7: mod_base = OTHER; note = uridine-3'-phosphate
  modified_base 8: mod_base = OTHER; note = uridine-3'-phosphate
  modified_base 9: mod_base = OTHER; note = adenosine-3'-phosphate
  modified_base 10: mod_base = OTHER; note = uridine-3'-phosphate
  modified_base 11: mod_base = OTHER; note = uridine-3'-phosphate
  modified_base 12: mod_base = OTHER; note = guanosine-3'-phosphate
  modified_base 13: mod_base = OTHER; note = adenosine-3'-phosphate
  modified_base 14: mod_base = OTHER; note = guanosine-3'-phosphate
  modified_base 15: mod_base = OTHER; note = uridine-3'-phosphate
  modified_base 16: mod_base = OTHER; note = uridine-3'-phosphate
  modified_base 17: mod_base = OTHER; note = cytidine-3'-phosphate
  modified_base 18: mod_base = OTHER; note = cytidine-3'-phosphate
  modified_base 19: mod_base = OTHER; note = uridine-3'-phosphate
  misc_feature 1..19: note = RNA
  misc_feature 20..21: note = DNA
agcactttattgagttccttt

SEQ ID NO: 1998 - DNA, 21 bp, synthetic construct
  source 1..21: mol_type = other DNA
  modified_base 1: mod_base = OTHER; note = adenosine-3'-phosphate
  modified_base 2: mod_base = OTHER; note = adenosine-3'-phosphate
  modified_base 3: mod_base = OTHER; note = guanosine-3'-phosphate
  modified_base 4: mod_base = OTHER; note = cytidine-3'-phosphate
  modified_base 5: mod_base = OTHER; note = adenosine-3'-phosphate
  modified_base 6: mod_base = OTHER; note = cytidine-3'-phosphate
  modified_base 7: mod_base = OTHER; note = uridine-3'-phosphate
  modified_base 8: mod_base = OTHER; note = uridine-3'-phosphate
  modified_base 9: mod_base = OTHER; note = uridine-3'-phosphate
  modified_base 10: mod_base = OTHER; note = adenosine-3'-phosphate
  modified_base 11: mod_base = OTHER; note = uridine-3'-phosphate
  modified_base 12: mod_base = OTHER; note = uridine-3'-phosphate
  modified_base 13: mod_base = OTHER; note = guanosine-3'-phosphate
  modified_base 14: mod_base = OTHER; note = adenosine-3'-phosphate
  modified_base 15: mod_base = OTHER; note = guanosine-3'-phosphate
  modified_base 16: mod_base = OTHER; note = uridine-3'-phosphate
  modified_base 17: mod_base = OTHER; note = uridine-3'-phosphate
  modified_base 18: mod_base = OTHER; note = cytidine-3'-phosphate
  modified_base 19: mod_base = OTHER; note = cytidine-3'-phosphate
  misc_feature 1..19: note = RNA
  misc_feature 20..21: note = DNA
aagcactttattgagttcctt

SEQ ID NO: 1999 - DNA, 21 bp, synthetic construct
  source 1..21: mol_type = other DNA
  modified_base 1: mod_base = OTHER; note = adenosine-3'-phosphate
  modified_base 2: mod_base = OTHER; note = adenosine-3'-phosphate
  modified_base 3: mod_base = OTHER; note = adenosine-3'-phosphate
  modified_base 4: mod_base = OTHER; note = guanosine-3'-phosphate
  modified_base 5: mod_base = OTHER; note = cytidine-3'-phosphate
  modified_base 6: mod_base = OTHER; note = adenosine-3'-phosphate
  modified_base 7: mod_base = OTHER; note = cytidine-3'-phosphate
  modified_base 8: mod_base = OTHER; note = uridine-3'-phosphate
  modified_base 9: mod_base = OTHER; note = uridine-3'-phosphate
  modified_base 10: mod_base = OTHER; note = uridine-3'-phosphate
  modified_base 11: mod_base = OTHER; note = adenosine-3'-phosphate
  modified_base 12: mod_base = OTHER; note = uridine-3'-phosphate
  modified_base 13: mod_base = OTHER; note = uridine-3'-phosphate
  modified_base 14: mod_base = OTHER; note = guanosine-3'-phosphate
  modified_base 15: mod_base = OTHER; note = adenosine-3'-phosphate
  modified_base 16: mod_base = OTHER; note = guanosine-3'-phosphate
  modified_base 17: mod_base = OTHER; note = uridine-3'-phosphate
  modified_base 18: mod_base = OTHER; note = uridine-3'-phosphate
  modified_base 19: mod_base = OTHER; note = cytidine-3'-phosphate
  misc_feature 1..19: note = RNA
  misc_feature 20..21: note = DNA
aaagcactttattgagttctt

SEQ ID NO: 2000 - DNA, 21 bp, synthetic construct
  source 1..21: mol_type = other DNA
  modified_base 1: mod_base = OTHER; note = uridine-3'-phosphate
  modified_base 2: mod_base = OTHER; note = adenosine-3'-phosphate
  modified_base 3: mod_base = OTHER; note = adenosine-3'-phosphate
  modified_base 4: mod_base = OTHER; note = adenosine-3'-phosphate
  modified_base 5: mod_base = OTHER; note = guanosine-3'-phosphate
  modified_base 6: mod_base = OTHER; note = cytidine-3'-phosphate
  modified_base 7: mod_base = OTHER; note = adenosine-3'-phosphate
  modified_base 8: mod_base = OTHER; note = cytidine-3'-phosphate
  modified_base 9: mod_base = OTHER; note = uridine-3'-phosphate
  modified_base 10: mod_base = OTHER; note = uridine-3'-phosphate
  modified_base 11: mod_base = OTHER; note = uridine-3'-phosphate
  modified_base 12: mod_base = OTHER; note = adenosine-3'-phosphate
  modified_base 13: mod_base = OTHER; note = uridine-3'-phosphate
  modified_base 14: mod_base = OTHER; note = uridine-3'-phosphate
  modified_base 15: mod_base = OTHER; note = guanosine-3'-phosphate
  modified_base 16: mod_base = OTHER; note = adenosine-3'-phosphate
  modified_base 17: mod_base = OTHER; note = guanosine-3'-phosphate
  modified_base 18: mod_base = OTHER; note = uridine-3'-phosphate
  modified_base 19: mod_base = OTHER; note = uridine-3'-phosphate
  misc_feature 1..19: note = RNA
  misc_feature 20..21: note = DNA
taaagcactttattgagtttt

SEQ ID NO: 2001 - DNA, 21 bp, synthetic construct
  source 1..21: mol_type = other DNA
  modified_base 1: mod_base = OTHER; note = uridine-3'-phosphate
  modified_base 2: mod_base = OTHER; note = cytidine-3'-phosphate
  modified_base 3: mod_base = OTHER; note = adenosine-3'-phosphate
  modified_base 4: mod_base = OTHER; note = adenosine-3'-phosphate
  modified_base 5: mod_base = OTHER; note = adenosine-3'-phosphate
  modified_base 6: mod_base = OTHER; note = guanosine-3'-phosphate
  modified_base 7: mod_base = OTHER; note = cytidine-3'-phosphate
  modified_base 8: mod_base = OTHER; note = adenosine-3'-phosphate
  modified_base 9: mod_base = OTHER; note = cytidine-3'-phosphate
  modified_base 10: mod_base = OTHER; note = uridine-3'-phosphate
  modified_base 11: mod_base = OTHER; note = uridine-3'-phosphate
  modified_base 12: mod_base = OTHER; note = uridine-3'-phosphate
  modified_base 13: mod_base = OTHER; note = adenosine-3'-phosphate
  modified_base 14: mod_base = OTHER; note = uridine-3'-phosphate
  modified_base 15: mod_base = OTHER; note = uridine-3'-phosphate
  modified_base 16: mod_base = OTHER; note = guanosine-3'-phosphate
  modified_base 17: mod_base = OTHER; note = adenosine-3'-phosphate
  modified_base 18: mod_base = OTHER; note = guanosine-3'-phosphate
  modified_base 19: mod_base = OTHER; note = uridine-3'-phosphate
  misc_feature 1..19: note = RNA
  misc_feature 20..21: note = DNA
tcaaagcactttattgagttt

SEQ ID NO: 2002 - DNA, 21 bp, synthetic construct
  source 1..21: mol_type = other DNA
  modified_base 1: mod_base = OTHER; note = uridine-3'-phosphate
  modified_base 2: mod_base = OTHER; note = uridine-3'-phosphate
  modified_base 3: mod_base = OTHER; note = uridine-3'-phosphate
  modified_base 4: mod_base = OTHER; note = cytidine-3'-phosphate
  modified_base 5: mod_base = OTHER; note = adenosine-3'-phosphate
  modified_base 6: mod_base = OTHER; note = adenosine-3'-phosphate
  modified_base 7: mod_base = OTHER; note = adenosine-3'-phosphate
  modified_base 8: mod_base = OTHER; note = guanosine-3'-phosphate
  modified_base 9: mod_base = OTHER; note = cytidine-3'-phosphate
  modified_base 10: mod_base = OTHER; note = adenosine-3'-phosphate
  modified_base 11: mod_base = OTHER; note = cytidine-3'-phosphate
  modified_base 12: mod_base = OTHER; note = uridine-3'-phosphate
  modified_base 13: mod_base = OTHER; note = uridine-3'-phosphate
  modified_base 14: mod_base = OTHER; note = uridine-3'-phosphate
  modified_base 15: mod_base = OTHER; note = adenosine-3'-phosphate
  modified_base 16: mod_base = OTHER; note = uridine-3'-phosphate
  modified_base 17: mod_base = OTHER; note = uridine-3'-phosphate
  modified_base 18: mod_base = OTHER; note = guanosine-3'-phosphate
  modified_base 19: mod_base = OTHER; note = adenosine-3'-phosphate
  misc_feature 1..19: note = RNA
  misc_feature 20..21: note = DNA
tttcaaagcactttattgatt

SEQ ID NO: 2003 - DNA, 21 bp, synthetic construct
  source 1..21: mol_type = other DNA
  modified_base 1: mod_base = OTHER; note = uridine-3'-phosphate
  modified_base 2: mod_base = OTHER; note = uridine-3'-phosphate
  modified_base 3: mod_base = OTHER; note = uridine-3'-phosphate
  modified_base 4: mod_base = OTHER; note = uridine-3'-phosphate
  modified_base 5: mod_base = OTHER; note = cytidine-3'-phosphate
  modified_base 6: mod_base = OTHER; note = adenosine-3'-phosphate
  modified_base 7: mod_base = OTHER; note = adenosine-3'-phosphate
  modified_base 8: mod_base = OTHER; note = adenosine-3'-phosphate
  modified_base 9: mod_base = OTHER; note = guanosine-3'-phosphate
  modified_base 10: mod_base = OTHER; note = cytidine-3'-phosphate
  modified_base 11: mod_base = OTHER; note = adenosine-3'-phosphate
  modified_base 12: mod_base = OTHER; note = cytidine-3'-phosphate
  modified_base 13: mod_base = OTHER; note = uridine-3'-phosphate
  modified_base 14: mod_base = OTHER; note = uridine-3'-phosphate
  modified_base 15: mod_base = OTHER; note = uridine-3'-phosphate
  modified_base 16: mod_base = OTHER; note = adenosine-3'-phosphate
  modified_base 17: mod_base = OTHER; note = uridine-3'-phosphate
  modified_base 18: mod_base = OTHER; note = uridine-3'-phosphate
  modified_base 19: mod_base = OTHER; note = guanosine-3'-phosphate
  misc_feature 1..19: note = RNA
  misc_feature 20..21: note = DNA
ttttcaaagcactttattgtt

SEQ ID NO: 2004 - DNA, 21 bp, synthetic construct
  source 1..21: mol_type = other DNA
  modified_base 1: mod_base = OTHER; note = adenosine-3'-phosphate
  modified_base 2: mod_base = OTHER; note = uridine-3'-phosphate
  modified_base 3: mod_base = OTHER; note = uridine-3'-phosphate
  modified_base 4: mod_base = OTHER; note = uridine-3'-phosphate
  modified_base 5: mod_base = OTHER; note = uridine-3'-phosphate
  modified_base 6: mod_base = OTHER; note = cytidine-3'-phosphate
  modified_base 7: mod_base = OTHER; note = adenosine-3'-phosphate
  modified_base 8: mod_base = OTHER; note = adenosine-3'-phosphate
  modified_base 9: mod_base = OTHER; note = adenosine-3'-phosphate
  modified_base 10: mod_base = OTHER; note = guanosine-3'-phosphate
  modified_base 11: mod_base = OTHER; note = cytidine-3'-phosphate
  modified_base 12: mod_base = OTHER; note = adenosine-3'-phosphate
  modified_base 13: mod_base = OTHER; note = cytidine-3'-phosphate
  modified_base 14: mod_base = OTHER; note = uridine-3'-phosphate
  modified_base 15: mod_base = OTHER; note = uridine-3'-phosphate
  modified_base 16: mod_base = OTHER; note = uridine-3'-phosphate
  modified_base 17: mod_base = OTHER; note = adenosine-3'-phosphate
  modified_base 18: mod_base = OTHER; note = uridine-3'-phosphate
  modified_base 19: mod_base = OTHER; note = uridine-3'-phosphate
  misc_feature 1..19: note = RNA
  misc_feature 20..21: note = DNA
attttcaaagcactttatttt

SEQ ID NO: 2005 - DNA, 21 bp, synthetic construct
  source 1..21: mol_type = other DNA
  modified_base 1: mod_base = OTHER; note = uridine-3'-phosphate
  modified_base 2: mod_base = OTHER; note = adenosine-3'-phosphate
  modified_base 3: mod_base = OTHER; note = uridine-3'-phosphate
  modified_base 4: mod_base = OTHER; note = uridine-3'-phosphate
  modified_base 5: mod_base = OTHER; note = uridine-3'-phosphate
  modified_base 6: mod_base = OTHER; note = uridine-3'-phosphate
  modified_base 7: mod_base = OTHER; note = cytidine-3'-phosphate
  modified_base 8: mod_base = OTHER; note = adenosine-3'-phosphate
  modified_base 9: mod_base = OTHER; note = adenosine-3'-phosphate
  modified_base 10: mod_base = OTHER; note = adenosine-3'-phosphate
  modified_base 11: mod_base = OTHER; note = guanosine-3'-phosphate
  modified_base 12: mod_base = OTHER; note = cytidine-3'-phosphate
  modified_base 13: mod_base = OTHER; note = adenosine-3'-phosphate
  modified_base 14: mod_base = OTHER; note = cytidine-3'-phosphate
  modified_base 15: mod_base = OTHER; note = uridine-3'-phosphate
  modified_base 16: mod_base = OTHER; note = uridine-3'-phosphate
  modified_base 17: mod_base = OTHER; note = uridine-3'-phosphate
  modified_base 18: mod_base = OTHER; note = adenosine-3'-phosphate
  modified_base 19: mod_base = OTHER; note = uridine-3'-phosphate
  misc_feature 1..19: note = RNA
  misc_feature 20..21: note = DNA
tattttcaaagcactttattt

SEQ ID NO: 2006 - DNA, 21 bp, synthetic construct
  source 1..21: mol_type = other DNA
  modified_base 1: mod_base = OTHER; note = uridine-3'-phosphate
  modified_base 2: mod_base = OTHER; note = cytidine-3'-phosphate
  modified_base 3: mod_base = OTHER; note = adenosine-3'-phosphate
  modified_base 4: mod_base = OTHER; note = uridine-3'-phosphate
  modified_base 5: mod_base = OTHER; note = uridine-3'-phosphate
  modified_base 6: mod_base = OTHER; note = uridine-3'-phosphate
  modified_base 7: mod_base = OTHER; note = uridine-3'-phosphate
  modified_base 8: mod_base = OTHER; note = cytidine-3'-phosphate
  modified_base 9: mod_base = OTHER; note = adenosine-3'-phosphate
  modified_base 10: mod_base = OTHER; note = adenosine-3'-phosphate
  modified_base 11: mod_base = OTHER; note = adenosine-3'-phosphate
  modified_base 12: mod_base = OTHER; note = guanosine-3'-phosphate
  modified_base 13: mod_base = OTHER; note = cytidine-3'-phosphate
  modified_base 14: mod_base = OTHER; note = adenosine-3'-phosphate
  modified_base 15: mod_base = OTHER; note = cytidine-3'-phosphate
  modified_base 16: mod_base = OTHER; note = uridine-3'-phosphate
  modified_base 17: mod_base = OTHER; note = uridine-3'-phosphate
  modified_base 18: mod_base = OTHER; note = uridine-3'-phosphate
  modified_base 19: mod_base = OTHER; note = adenosine-3'-phosphate
  misc_feature 1..19: note = RNA
  misc_feature 20..21: note = DNA
tcattttcaaagcactttatt

SEQ ID NO: 2007 - DNA, 21 bp, synthetic construct
  source 1..21: mol_type = other DNA
  modified_base 1: mod_base = OTHER; note = adenosine-3'-phosphate
  modified_base 2: mod_base = OTHER; note = guanosine-3'-phosphate
  modified_base 3: mod_base = OTHER; note = cytidine-3'-phosphate
  modified_base 4: mod_base = OTHER; note = adenosine-3'-phosphate
  modified_base 5: mod_base = OTHER; note = uridine-3'-phosphate
  modified_base 6: mod_base = OTHER; note = uridine-3'-phosphate
  modified_base 7: mod_base = OTHER; note = uridine-3'-phosphate
  modified_base 8: mod_base = OTHER; note = uridine-3'-phosphate
  modified_base 9: mod_base = OTHER; note = cytidine-3'-phosphate
  modified_base 10: mod_base = OTHER; note = adenosine-3'-phosphate
  modified_base 11: mod_base = OTHER; note = adenosine-3'-phosphate
  modified_base 12: mod_base = OTHER; note = adenosine-3'-phosphate
  modified_base 13: mod_base = OTHER; note = guanosine-3'-phosphate
  modified_base 14: mod_base = OTHER; note = cytidine-3'-phosphate
  modified_base 15: mod_base = OTHER; note = adenosine-3'-phosphate
  modified_base 16: mod_base = OTHER; note = cytidine-3'-phosphate
  modified_base 17: mod_base = OTHER; note = uridine-3'-phosphate
  modified_base 18: mod_base = OTHER; note = uridine-3'-phosphate
  modified_base 19: mod_base = OTHER; note = uridine-3'-phosphate
  misc_feature 1..19: note = RNA
  misc_feature 20..21: note = DNA
agcattttcaaagcacttttt

SEQ ID NO: 2008 - DNA, 21 bp, synthetic construct
  source 1..21: mol_type = other DNA
  modified_base 1: mod_base = OTHER; note = uridine-3'-phosphate
  modified_base 2: mod_base = OTHER; note = adenosine-3'-phosphate
  modified_base 3: mod_base = OTHER; note = guanosine-3'-phosphate
  modified_base 4: mod_base = OTHER; note = cytidine-3'-phosphate
  modified_base 5: mod_base = OTHER; note = adenosine-3'-phosphate
  modified_base 6: mod_base = OTHER; note = uridine-3'-phosphate
  modified_base 7: mod_base = OTHER; note = uridine-3'-phosphate
  modified_base 8: mod_base = OTHER; note = uridine-3'-phosphate
  modified_base 9: mod_base = OTHER; note = uridine-3'-phosphate
  modified_base 10: mod_base = OTHER; note = cytidine-3'-phosphate
  modified_base 11: mod_base = OTHER; note = adenosine-3'-phosphate
  modified_base 12: mod_base = OTHER; note = adenosine-3'-phosphate
  modified_base 13: mod_base = OTHER; note = adenosine-3'-phosphate
  modified_base 14: mod_base = OTHER; note = guanosine-3'-phosphate
  modified_base 15: mod_base = OTHER; note = cytidine-3'-phosphate
  modified_base 16: mod_base = OTHER; note = adenosine-3'-phosphate
  modified_base 17: mod_base = OTHER; note = cytidine-3'-phosphate
  modified_base 18: mod_base = OTHER; note = uridine-3'-phosphate
  modified_base 19: mod_base = OTHER; note = uridine-3'-phosphate
  misc_feature 1..19: note = RNA
  misc_feature 20..21: note = DNA
tagcattttcaaagcactttt

SEQ ID NO: 2009 - DNA, 21 bp, synthetic construct
  source 1..21: mol_type = other DNA
  modified_base 1: mod_base = OTHER; note = uridine-3'-phosphate
  modified_base 2: mod_base = OTHER; note = cytidine-3'-phosphate
  modified_base 3: mod_base = OTHER; note = adenosine-3'-phosphate
  modified_base 4: mod_base = OTHER; note = guanosine-3'-phosphate
  modified_base 5: mod_base = OTHER; note = cytidine-3'-phosphate
  modified_base 6: mod_base = OTHER; note = adenosine-3'-phosphate
  modified_base 7: mod_base = OTHER; note = uridine-3'-phosphate
  modified_base 8: mod_base = OTHER; note = uridine-3'-phosphate
  modified_base 9: mod_base = OTHER; note = uridine-3'-phosphate
  modified_base 10: mod_base = OTHER; note = uridine-3'-phosphate
  modified_base 11: mod_base = OTHER; note = cytidine-3'-phosphate
  modified_base 12: mod_base = OTHER; note = adenosine-3'-phosphate
  modified_base 13: mod_base = OTHER; note = adenosine-3'-phosphate
  modified_base 14: mod_base = OTHER; note = adenosine-3'-phosphate
  modified_base 15: mod_base = OTHER; note = guanosine-3'-phosphate
  modified_base 16: mod_base = OTHER; note = cytidine-3'-phosphate
  modified_base 17: mod_base = OTHER; note = adenosine-3'-phosphate
  modified_base 18: mod_base = OTHER; note = cytidine-3'-phosphate
  modified_base 19: mod_base = OTHER; note = uridine-3'-phosphate
  misc_feature 1..19: note = RNA
  misc_feature 20..21: note = DNA
tcagcattttcaaagcacttt

SEQ ID NO: 2010 - DNA, 21 bp, synthetic construct
  source 1..21: mol_type = other DNA
  modified_base 1: mod_base = OTHER; note = uridine-3'-phosphate
  modified_base 2: mod_base = OTHER; note = uridine-3'-phosphate
  modified_base 3: mod_base = OTHER; note = cytidine-3'-phosphate
  modified_base 4: mod_base = OTHER; note = adenosine-3'-phosphate
  modified_base 5: mod_base = OTHER; note = guanosine-3'-phosphate
  modified_base 6: mod_base = OTHER; note = cytidine-3'-phosphate
  modified_base 7: mod_base = OTHER; note = adenosine-3'-phosphate
  modified_base 8: mod_base = OTHER; note = uridine-3'-phosphate
  modified_base 9: mod_base = OTHER; note = uridine-3'-phosphate
  modified_base 10: mod_base = OTHER; note = uridine-3'-phosphate
  modified_base 11: mod_base = OTHER; note = uridine-3'-phosphate
  modified_base 12: mod_base = OTHER; note = cytidine-3'-phosphate
  modified_base 13: mod_base = OTHER; note = adenosine-3'-phosphate
  modified_base 14: mod_base = OTHER; note = adenosine-3'-phosphate
  modified_base 15: mod_base = OTHER; note = adenosine-3'-phosphate
  modified_base 16: mod_base = OTHER; note = guanosine-3'-phosphate
  modified_base 17: mod_base = OTHER; note = cytidine-3'-phosphate
  modified_base 18: mod_base = OTHER; note = adenosine-3'-phosphate
  modified_base 19: mod_base = OTHER; note = cytidine-3'-phosphate
  misc_feature 1..19: note = RNA
  misc_feature 20..21: note = DNA
ttcagcattttcaaagcactt

SEQ ID NO: 2011 - DNA, 21 bp, synthetic construct
  source 1..21: mol_type = other DNA
  modified_base 1: mod_base = OTHER; note = uridine-3'-phosphate
  modified_base 2: mod_base = OTHER; note = cytidine-3'-phosphate
  modified_base 3: mod_base = OTHER; note = uridine-3'-phosphate
  modified_base 4: mod_base = OTHER; note = cytidine-3'-phosphate
  modified_base 5: mod_base = OTHER; note = adenosine-3'-phosphate
  modified_base 6: mod_base = OTHER; note = guanosine-3'-phosphate
  modified_base 7: mod_base = OTHER; note = cytidine-3'-phosphate
  modified_base 8: mod_base = OTHER; note = adenosine-3'-phosphate
  modified_base 9: mod_base = OTHER; note = uridine-3'-phosphate
  modified_base 10: mod_base = OTHER; note = uridine-3'-phosphate
  modified_base 11: mod_base = OTHER; note = uridine-3'-phosphate
  modified_base 12: mod_base = OTHER; note = uridine-3'-phosphate
  modified_base 13: mod_base = OTHER; note = cytidine-3'-phosphate
  modified_base 14: mod_base = OTHER; note = adenosine-3'-phosphate
  modified_base 15: mod_base = OTHER; note = adenosine-3'-phosphate
  modified_base 16: mod_base = OTHER; note = adenosine-3'-phosphate
  modified_base 17: mod_base = OTHER; note = guanosine-3'-phosphate
  modified_base 18: mod_base = OTHER; note = cytidine-3'-phosphate
  modified_base 19: mod_base = OTHER; note = adenosine-3'-phosphate
  misc_feature 1..19: note = RNA
  misc_feature 20..21: note = DNA
tctcagcattttcaaagcatt

SEQ ID NO: 2012 - DNA, 21 bp, synthetic construct
  source 1..21: mol_type = other DNA
  modified_base 1: mod_base = OTHER; note = uridine-3'-phosphate
  modified_base 2: mod_base = OTHER; note = uridine-3'-phosphate
  modified_base 3: mod_base = OTHER; note = cytidine-3'-phosphate
  modified_base 4: mod_base = OTHER; note = uridine-3'-phosphate
  modified_base 5: mod_base = OTHER; note = cytidine-3'-phosphate
  modified_base 6: mod_base = OTHER; note = adenosine-3'-phosphate
  modified_base 7: mod_base = OTHER; note = guanosine-3'-phosphate
  modified_base 8: mod_base = OTHER; note = cytidine-3'-phosphate
  modified_base 9: mod_base = OTHER; note = adenosine-3'-phosphate
  modified_base 10: mod_base = OTHER; note = uridine-3'-phosphate
  modified_base 11: mod_base = OTHER; note = uridine-3'-phosphate
  modified_base 12: mod_base = OTHER; note = uridine-3'-phosphate
  modified_base 13: mod_base = OTHER; note = uridine-3'-phosphate
  modified_base 14: mod_base = OTHER; note = cytidine-3'-phosphate
  modified_base 15: mod_base = OTHER; note = adenosine-3'-phosphate
  modified_base 16: mod_base = OTHER; note = adenosine-3'-phosphate
  modified_base 17: mod_base = OTHER; note = adenosine-3'-phosphate
  modified_base 18: mod_base = OTHER; note = guanosine-3'-phosphate
  modified_base 19: mod_base = OTHER; note = cytidine-3'-phosphate
  misc_feature 1..19: note = RNA
  misc_feature 20..21: note = DNA
ttctcagcattttcaaagctt

SEQ ID NO: 2013 - DNA, 21 bp, synthetic construct
  source 1..21: mol_type = other DNA
  modified_base 1: mod_base = OTHER; note = uridine-3'-phosphate
  modified_base 2: mod_base = OTHER; note = uridine-3'-phosphate
  modified_base 3: mod_base = OTHER; note = uridine-3'-phosphate
  modified_base 4: mod_base = OTHER; note = cytidine-3'-phosphate
  modified_base 5: mod_base = OTHER; note = uridine-3'-phosphate
  modified_base 6: mod_base = OTHER; note = cytidine-3'-phosphate
  modified_base 7: mod_base = OTHER; note = adenosine-3'-phosphate
  modified_base 8: mod_base = OTHER; note = guanosine-3'-phosphate
  modified_base 9: mod_base = OTHER; note = cytidine-3'-phosphate
  modified_base 10: mod_base = OTHER; note = adenosine-3'-phosphate
  modified_base 11: mod_base = OTHER; note = uridine-3'-phosphate
  modified_base 12: mod_base = OTHER; note = uridine-3'-phosphate
  modified_base 13: mod_base = OTHER; note = uridine-3'-phosphate
  modified_base 14: mod_base = OTHER; note = uridine-3'-phosphate
  modified_base 15: mod_base = OTHER; note = cytidine-3'-phosphate
  modified_base 16: mod_base = OTHER; note = adenosine-3'-phosphate
  modified_base 17: mod_base = OTHER; note = adenosine-3'-phosphate
  modified_base 18: mod_base = OTHER; note = adenosine-3'-phosphate
  modified_base 19: mod_base = OTHER; note = guanosine-3'-phosphate
  misc_feature 1..19: note = RNA
  misc_feature 20..21: note = DNA
tttctcagcattttcaaagtt

SEQ ID NO: 2014 - DNA, 21 bp, synthetic construct
  source 1..21: mol_type = other DNA
  modified_base 1: mod_base = OTHER; note = uridine-3'-phosphate
  modified_base 2: mod_base = OTHER; note = uridine-3'-phosphate
  modified_base 3: mod_base = OTHER; note = uridine-3'-phosphate
  modified_base 4: mod_base = OTHER; note = uridine-3'-phosphate
  modified_base 5: mod_base = OTHER; note = cytidine-3'-phosphate
  modified_base 6: mod_base = OTHER; note = uridine-3'-phosphate
  modified_base 7: mod_base = OTHER; note = cytidine-3'-phosphate
  modified_base 8: mod_base = OTHER; note = adenosine-3'-phosphate
  modified_base 9: mod_base = OTHER; note = guanosine-3'-phosphate
  modified_base 10: mod_base = OTHER; note = cytidine-3'-phosphate
  modified_base 11: mod_base = OTHER; note = adenosine-3'-phosphate
  modified_base 12: mod_base = OTHER; note = uridine-3'-phosphate
  modified_base 13: mod_base = OTHER; note = uridine-3'-phosphate
  modified_base 14: mod_base = OTHER; note = uridine-3'-phosphate
  modified_base 15: mod_base = OTHER; note = uridine-3'-phosphate
  modified_base 16: mod_base = OTHER; note = cytidine-3'-phosphate
  modified_base 17: mod_base = OTHER; note = adenosine-3'-phosphate
  modified_base 18: mod_base = OTHER; note = adenosine-3'-phosphate
  modified_base 19: mod_base = OTHER; note = adenosine-3'-phosphate
  misc_feature 1..19: note = RNA
  misc_feature 20..21: note = DNA
ttttctcagcattttcaaatt

SEQ ID NO: 2015 - DNA, 21 bp, synthetic construct
  source 1..21: mol_type = other DNA
  modified_base 1: mod_base = OTHER; note = uridine-3'-phosphate
  modified_base 2: mod_base = OTHER; note = uridine-3'-phosphate
  modified_base 3: mod_base = OTHER; note = uridine-3'-phosphate
  modified_base 4: mod_base = OTHER; note = uridine-3'-phosphate
  modified_base 5: mod_base = OTHER; note = uridine-3'-phosphate
  modified_base 6: mod_base = OTHER; note = cytidine-3'-phosphate
  modified_base 7: mod_base = OTHER; note = uridine-3'-phosphate
  modified_base 8: mod_base = OTHER; note = cytidine-3'-phosphate
  modified_base 9: mod_base = OTHER; note = adenosine-3'-phosphate
  modified_base 10: mod_base = OTHER; note = guanosine-3'-phosphate
  modified_base 11: mod_base = OTHER; note = cytidine-3'-phosphate
  modified_base 12: mod_base = OTHER; note = adenosine-3'-phosphate
  modified_base 13: mod_base = OTHER; note = uridine-3'-phosphate
  modified_base 14: mod_base = OTHER; note = uridine-3'-phosphate
  modified_base 15: mod_base = OTHER; note = uridine-3'-phosphate
  modified_base 16: mod_base = OTHER; note = uridine-3'-phosphate
  modified_base 17: mod_base = OTHER; note = cytidine-3'-phosphate
  modified_base 18: mod_base = OTHER; note = adenosine-3'-phosphate
  modified_base 19: mod_base = OTHER; note = adenosine-3'-phosphate
  misc_feature 1..19: note = RNA
  misc_feature 20..21: note = DNA
tttttctcagcattttcaatt

SEQ ID NO: 2016 - DNA, 21 bp, synthetic construct
  source 1..21: mol_type = other DNA
  modified_base 1: mod_base = OTHER; note = uridine-3'-phosphate
  modified_base 2: mod_base = OTHER; note = uridine-3'-phosphate
  modified_base 3: mod_base = OTHER; note = uridine-3'-phosphate
  modified_base 4: mod_base = OTHER; note = uridine-3'-phosphate
  modified_base 5: mod_base = OTHER; note = uridine-3'-phosphate
  modified_base 6: mod_base = OTHER; note = uridine-3'-phosphate
  modified_base 7: mod_base = OTHER; note = cytidine-3'-phosphate
  modified_base 8: mod_base = OTHER; note = uridine-3'-phosphate
  modified_base 9: mod_base = OTHER; note = cytidine-3'-phosphate
  modified_base 10: mod_base = OTHER; note = adenosine-3'-phosphate
  modified_base 11: mod_base = OTHER; note = guanosine-3'-phosphate
  modified_base 12: mod_base = OTHER; note = cytidine-3'-phosphate
  modified_base 13: mod_base = OTHER; note = adenosine-3'-phosphate
  modified_base 14: mod_base = OTHER; note = uridine-3'-phosphate
  modified_base 15: mod_base = OTHER; note = uridine-3'-phosphate
  modified_base 16: mod_base = OTHER; note = uridine-3'-phosphate
  modified_base 17: mod_base = OTHER; note = uridine-3'-phosphate
  modified_base 18: mod_base = OTHER; note = cytidine-3'-phosphate
  modified_base 19: mod_base = OTHER; note = adenosine-3'-phosphate
  misc_feature 1..19: note = RNA
  misc_feature 20..21: note = DNA
ttttttctcagcattttcatt

SEQ ID NO: 2017 - DNA, 21 bp, synthetic construct
  source 1..21: mol_type = other DNA
  modified_base 1: mod_base = OTHER; note = uridine-3'-phosphate
  modified_base 2: mod_base = OTHER; note = uridine-3'-phosphate
  modified_base 3: mod_base = OTHER; note = uridine-3'-phosphate
  modified_base 4: mod_base = OTHER; note = uridine-3'-phosphate
  modified_base 5: mod_base = OTHER; note = uridine-3'-phosphate
  modified_base 6: mod_base = OTHER; note = uridine-3'-phosphate
  modified_base 7: mod_base = OTHER; note = uridine-3'-phosphate
  modified_base 8: mod_base = OTHER; note = cytidine-3'-phosphate
  modified_base 9: mod_base = OTHER; note = uridine-3'-phosphate
  modified_base 10: mod_base = OTHER; note = cytidine-3'-phosphate
  modified_base 11: mod_base = OTHER; note = adenosine-3'-phosphate
  modified_base 12: mod_base = OTHER; note = guanosine-3'-phosphate
  modified_base 13: mod_base = OTHER; note = cytidine-3'-phosphate
  modified_base 14: mod_base = OTHER; note = adenosine-3'-phosphate
  modified_base 15: mod_base = OTHER; note = uridine-3'-phosphate
  modified_base 16: mod_base = OTHER; note = uridine-3'-phosphate
  modified_base 17: mod_base = OTHER; note = uridine-3'-phosphate
  modified_base 18: mod_base = OTHER; note = uridine-3'-phosphate
  modified_base 19: mod_base = OTHER; note = cytidine-3'-phosphate
  misc_feature 1..19: note = RNA
  misc_feature 20..21: note = DNA
tttttttctcagcattttctt

SEQ ID NO: 2018 - DNA, 21 bp, synthetic construct
  source 1..21: mol_type = other DNA
  modified_base 1: mod_base = OTHER; note = uridine-3'-phosphate
  modified_base 2: mod_base = OTHER; note = uridine-3'-phosphate
  modified_base 3: mod_base = OTHER; note = uridine-3'-phosphate
  modified_base 4: mod_base = OTHER; note = uridine-3'-phosphate
  modified_base 5: mod_base = OTHER; note = uridine-3'-phosphate
  modified_base 6: mod_base = OTHER; note = uridine-3'-phosphate
  modified_base 7: mod_base = OTHER; note = uridine-3'-phosphate
  modified_base 8: mod_base = OTHER; note = uridine-3'-phosphate
  modified_base 9: mod_base = OTHER; note = cytidine-3'-phosphate
  modified_base 10: mod_base = OTHER; note = uridine-3'-phosphate
  modified_base 11: mod_base = OTHER; note = cytidine-3'-phosphate
  modified_base 12: mod_base = OTHER; note = adenosine-3'-phosphate
  modified_base 13: mod_base = OTHER; note = guanosine-3'-phosphate
  modified_base 14: mod_base = OTHER; note = cytidine-3'-phosphate
  modified_base 15: mod_base = OTHER; note = adenosine-3'-phosphate
  modified_base 16: mod_base = OTHER; note = uridine-3'-phosphate
  modified_base 17: mod_base = OTHER; note = uridine-3'-phosphate
  modified_base 18: mod_base = OTHER; note = uridine-3'-phosphate
  modified_base 19: mod_base = OTHER; note = uridine-3'-phosphate
  misc_feature 1..19: note = RNA
  misc_feature 20..21: note = DNA
ttttttttctcagcatttttt

SEQ ID NO: 2019 - DNA, 21 bp, synthetic construct
  source 1..21: mol_type = other DNA
  modified_base 1: mod_base = OTHER; note = uridine-3'-phosphate
  modified_base 2: mod_base = OTHER; note = uridine-3'-phosphate
  modified_base 3: mod_base = OTHER; note = uridine-3'-phosphate
  modified_base 4: mod_base = OTHER; note = uridine-3'-phosphate
  modified_base 5: mod_base = OTHER; note = uridine-3'-phosphate
  modified_base 6: mod_base = OTHER; note = uridine-3'-phosphate
  modified_base 7: mod_base = OTHER; note = uridine-3'-phosphate
  modified_base 8: mod_base = OTHER; note = uridine-3'-phosphate
  modified_base 9: mod_base = OTHER; note = uridine-3'-phosphate
  modified_base 10: mod_base = OTHER; note = cytidine-3'-phosphate
  modified_base 11: mod_base = OTHER; note = uridine-3'-phosphate
  modified_base 12: mod_base = OTHER; note = cytidine-3'-phosphate
  modified_base 13: mod_base = OTHER; note = adenosine-3'-phosphate
  modified_base 14: mod_base = OTHER; note = guanosine-3'-phosphate
  modified_base 15: mod_base = OTHER; note = cytidine-3'-phosphate
  modified_base 16: mod_base = OTHER; note = adenosine-3'-phosphate
  modified_base 17: mod_base = OTHER; note = uridine-3'-phosphate
  modified_base 18: mod_base = OTHER; note = uridine-3'-phosphate
  modified_base 19: mod_base = OTHER; note = uridine-3'-phosphate
  misc_feature 1..19: note = RNA
  misc_feature 20..21: note = DNA
tttttttttctcagcattttt

SEQ ID NO: 2020 - DNA, 21 bp, synthetic construct
  source 1..21: mol_type = other DNA
  modified_base 1: mod_base = OTHER; note = uridine-3'-phosphate
  modified_base 2: mod_base = OTHER; note = uridine-3'-phosphate
  modified_base 3: mod_base = OTHER; note = uridine-3'-phosphate
  modified_base 4: mod_base = OTHER; note = uridine-3'-phosphate
  modified_base 5: mod_base = OTHER; note = uridine-3'-phosphate
  modified_base 6: mod_base = OTHER; note = uridine-3'-phosphate
  modified_base 7: mod_base = OTHER; note = uridine-3'-phosphate
  modified_base 8: mod_base = OTHER; note = uridine-3'-phosphate
  modified_base 9: mod_base = OTHER; note = uridine-3'-phosphate
  modified_base 10: mod_base = OTHER; note = uridine-3'-phosphate
  modified_base 11: mod_base = OTHER; note = cytidine-3'-phosphate
  modified_base 12: mod_base = OTHER; note = uridine-3'-phosphate
  modified_base 13: mod_base = OTHER; note = cytidine-3'-phosphate
  modified_base 14: mod_base = OTHER; note = adenosine-3'-phosphate
  modified_base 15: mod_base = OTHER; note = guanosine-3'-phosphate
  modified_base 16: mod_base = OTHER; note = cytidine-3'-phosphate
  modified_base 17: mod_base = OTHER; note = adenosine-3'-phosphate
  modified_base 18: mod_base = OTHER; note = uridine-3'-phosphate
  modified_base 19: mod_base = OTHER; note = uridine-3'-phosphate
  misc_feature 1..19: note = RNA
  misc_feature 20..21: note = DNA
ttttttttttctcagcatttt

SEQ ID NO: 2021 - DNA, 21 bp, synthetic construct
  source 1..21: mol_type = other DNA
  modified_base 1: mod_base = OTHER; note = uridine-3'-phosphate
  modified_base 2: mod_base = OTHER; note = uridine-3'-phosphate
  modified_base 3: mod_base = OTHER; note = uridine-3'-phosphate
  modified_base 4: mod_base = OTHER; note = uridine-3'-phosphate
  modified_base 5: mod_base = OTHER; note = uridine-3'-phosphate
  modified_base 6: mod_base = OTHER; note = uridine-3'-phosphate
  modified_base 7: mod_base = OTHER; note = uridine-3'-phosphate
  modified_base 8: mod_base = OTHER; note = uridine-3'-phosphate
  modified_base 9: mod_base = OTHER; note = uridine-3'-phosphate
  modified_base 10: mod_base = OTHER; note = uridine-3'-phosphate
  modified_base 11: mod_base = OTHER; note = uridine-3'-phosphate
  modified_base 12: mod_base = OTHER; note = cytidine-3'-phosphate
  modified_base 13: mod_base = OTHER; note = uridine-3'-phosphate
  modified_base 14: mod_base = OTHER; note = cytidine-3'-phosphate
  modified_base 15: mod_base = OTHER; note = adenosine-3'-phosphate
  modified_base 16: mod_base = OTHER; note = guanosine-3'-phosphate
  modified_base 17: mod_base = OTHER; note = cytidine-3'-phosphate
  modified_base 18: mod_base = OTHER; note = adenosine-3'-phosphate
  modified_base 19: mod_base = OTHER; note = uridine-3'-phosphate
  misc_feature 1..19: note = RNA
  misc_feature 20..21: note = DNA
tttttttttttctcagcattt

SEQ ID NO: 2022 - RNA, 19 nt, synthetic construct
  source 1..19: mol_type = other RNA
gccaggatggcgcaggaac

SEQ ID NO: 2023 - RNA, 19 nt, synthetic construct
  source 1..19: mol_type = other RNA
ccaggatggcgcaggaact

SEQ ID NO: 2024 - RNA, 19 nt, synthetic construct
  source 1..19: mol_type = other RNA
caggatggcgcaggaactc

SEQ ID NO: 2025 - RNA, 19 nt, synthetic construct
  source 1..19: mol_type = other RNA
aggatggcgcaggaactca

SEQ ID NO: 2026 - RNA, 19 nt, synthetic construct
  source 1..19: mol_type = other RNA
ggatggcgcaggaactcaa

SEQ ID NO: 2027 - RNA, 19 nt, synthetic construct
  source 1..19: mol_type = other RNA
gatggcgcaggaactcaat

SEQ ID NO: 2028 - RNA, 19 nt, synthetic construct
  source 1..19: mol_type = other RNA
atggcgcaggaactcaata

SEQ ID NO: 2029 - RNA, 19 nt, synthetic construct
  source 1..19: mol_type = other RNA
tggcgcaggaactcaataa

SEQ ID NO: 2030 - RNA, 19 nt, synthetic construct
  source 1..19: mol_type = other RNA
ggcgcaggaactcaataaa

SEQ ID NO: 2031 - RNA, 19 nt, synthetic construct
  source 1..19: mol_type = other RNA
gcgcaggaactcaataaag

SEQ ID NO: 2032 - RNA, 19 nt, synthetic construct
  source 1..19: mol_type = other RNA
cgcaggaactcaataaagt

SEQ ID NO: 2033 - RNA, 19 nt, synthetic construct
  source 1..19: mol_type = other RNA
gcaggaactcaataaagtg

SEQ ID NO: 2034 - RNA, 19 nt, synthetic construct
  source 1..19: mol_type = other RNA
caggaactcaataaagtgc

SEQ ID NO: 2035 - RNA, 19 nt, synthetic construct
  source 1..19: mol_type = other RNA
aggaactcaataaagtgct

SEQ ID NO: 2036 - RNA, 19 nt, synthetic construct
  source 1..19: mol_type = other RNA
ggaactcaataaagtgctt

SEQ ID NO: 2037 - RNA, 19 nt, synthetic construct
  source 1..19: mol_type = other RNA
gaactcaataaagtgcttt

SEQ ID NO: 2038 - RNA, 19 nt, synthetic construct
  source 1..19: mol_type = other RNA
aactcaataaagtgctttg

SEQ ID NO: 2039 - RNA, 19 nt, synthetic construct
  source 1..19: mol_type = other RNA
actcaataaagtgctttga

SEQ ID NO: 2040 - RNA, 19 nt, synthetic construct
  source 1..19: mol_type = other RNA
tcaataaagtgctttgaaa

SEQ ID NO: 2041 - RNA, 19 nt, synthetic construct
  source 1..19: mol_type = other RNA
caataaagtgctttgaaaa

SEQ ID NO: 2042 - RNA, 19 nt, synthetic construct
  source 1..19: mol_type = other RNA
aataaagtgctttgaaaat

SEQ ID NO: 2043 - RNA, 19 nt, synthetic construct
  source 1..19: mol_type = other RNA
ataaagtgctttgaaaatg

SEQ ID NO: 2044 - RNA, 19 nt, synthetic construct
  source 1..19: mol_type = other RNA
taaagtgctttgaaaatgc

SEQ ID NO: 2045 - RNA, 19 nt, synthetic construct
  source 1..19: mol_type = other RNA
aaagtgctttgaaaatgct

SEQ ID NO: 2046 - RNA, 19 nt, synthetic construct
  source 1..19: mol_type = other RNA
aagtgctttgaaaatgctg

SEQ ID NO: 2047 - RNA, 19 nt, synthetic construct
  source 1..19: mol_type = other RNA
agtgctttgaaaatgctga

SEQ ID NO: 2048 - RNA, 19 nt, synthetic construct
  source 1..19: mol_type = other RNA
gtgctttgaaaatgctgag

SEQ ID NO: 2049 - RNA, 19 nt, synthetic construct
  source 1..19: mol_type = other RNA
tgctttgaaaatgctgaga

SEQ ID NO: 2050 - RNA, 19 nt, synthetic construct
  source 1..19: mol_type = other RNA
gctttgaaaatgctgagaa

SEQ ID NO: 2051 - RNA, 19 nt, synthetic construct
  source 1..19: mol_type = other RNA
ctttgaaaatgctgagaaa

SEQ ID NO: 2052 - RNA, 19 nt, synthetic construct
  source 1..19: mol_type = other RNA
tttgaaaatgctgagaaaa

SEQ ID NO: 2053 - RNA, 19 nt, synthetic construct
  source 1..19: mol_type = other RNA
ttgaaaatgctgagaaaaa

SEQ ID NO: 2054 - RNA, 19 nt, synthetic construct
  source 1..19: mol_type = other RNA
tgaaaatgctgagaaaaaa

SEQ ID NO: 2055 - RNA, 19 nt, synthetic construct
  source 1..19: mol_type = other RNA
gaaaatgctgagaaaaaaa

SEQ ID NO: 2056 - RNA, 19 nt, synthetic construct
  source 1..19: mol_type = other RNA
aaaatgctgagaaaaaaaa

SEQ ID NO: 2057 - RNA, 19 nt, synthetic construct
  source 1..19: mol_type = other RNA
aaatgctgagaaaaaaaaa

SEQ ID NO: 2058 - RNA, 19 nt, synthetic construct
  source 1..19: mol_type = other RNA
aatgctgagaaaaaaaaaa

SEQ ID NO: 2059 - RNA, 19 nt, synthetic construct
  source 1..19: mol_type = other RNA
atgctgagaaaaaaaaaaa

SEQ ID NO: 2060 - RNA, 21 nt, synthetic construct
  source 1..21: mol_type = other RNA
ggagcccaagaaagtgaaaga

SEQ ID NO: 2061 - RNA, 21 nt, synthetic construct
  source 1..21: mol_type = other RNA
ggagcccaagaaagtgaaaga

SEQ ID NO: 2062 - RNA, 21 nt, synthetic construct
  source 1..21: mol_type = other RNA
gagcccaagaaagtgaaagaa

SEQ ID NO: 2063 - RNA, 21 nt, synthetic construct
  source 1..21: mol_type = other RNA
gagcccaagaaagtgaaagaa

SEQ ID NO: 2064 - RNA, 21 nt, synthetic construct
  source 1..21: mol_type = other RNA
gcccaagaaagtgaaagacca

SEQ ID NO: 2065 - RNA, 21 nt, synthetic construct
  source 1..21: mol_type = other RNA
gcccaagaaagtgaaagacca

SEQ ID NO: 2066 - RNA, 21 nt, synthetic construct
  source 1..21: mol_type = other RNA
cccaagaaagtgaaagaccaa

SEQ ID NO: 2067 - RNA, 21 nt, synthetic construct
  source 1..21: mol_type = other RNA
cccaagaaagtgaaagaccaa

SEQ ID NO: 2068 - RNA, 21 nt, synthetic construct
  source 1..21: mol_type = other RNA
aaagagaaatgctttgagcca

SEQ ID NO: 2069 - RNA, 21 nt, synthetic construct
  source 1..21: mol_type = other RNA
aaagagaaatgctttgagcca

SEQ ID NO: 2070 - RNA, 21 nt, synthetic construct
  source 1..21: mol_type = other RNA
aagagaaatgctttgagccta

SEQ ID NO: 2071 - RNA, 21 nt, synthetic construct
  source 1..21: mol_type = other RNA
aagagaaatgctttgagccta

SEQ ID NO: 2072 - RNA, 21 nt, synthetic construct
  source 1..21: mol_type = other RNA
agagaaatgctttgagcctca

SEQ ID NO: 2073 - RNA, 21 nt, synthetic construct
  source 1..21: mol_type = other RNA
agagaaatgctttgagcctca

SEQ ID NO: 2074 - RNA, 21 nt, synthetic construct
  source 1..21: mol_type = other RNA
gagaaatgctttgagcctcaa

SEQ ID NO: 2075 - RNA, 21 nt, synthetic construct
  source 1..21: mol_type = other RNA
gagaaatgctttgagcctcaa

SEQ ID NO: 2076 - RNA, 21 nt, synthetic construct
  source 1..21: mol_type = other RNA
agaaatgctttgagcctcaga

SEQ ID NO: 2077 - RNA, 21 nt, synthetic construct
  source 1..21: mol_type = other RNA
agaaatgctttgagcctcaga

SEQ ID NO: 2078 - RNA, 21 nt, synthetic construct
  source 1..21: mol_type = other RNA
aaatgctttgagcctcagcta

SEQ ID NO: 2079 - RNA, 21 nt, synthetic construct
  source 1..21: mol_type = other RNA
aaatgctttgagcctcagcta

SEQ ID NO: 2080 - RNA, 21 nt, synthetic construct
  source 1..21: mol_type = other RNA
atgctttgagcctcagcttca

SEQ ID NO: 2081 - RNA, 21 nt, synthetic construct
  source 1..21: mol_type = other RNA
atgctttgagcctcagcttca

SEQ ID NO: 2082 - RNA, 21 nt, synthetic construct
  source 1..21: mol_type = other RNA
tgctttgagcctcagcttcta

SEQ ID NO: 2083 - RNA, 21 nt, synthetic construct
  source 1..21: mol_type = other RNA
tgctttgagcctcagcttcta

SEQ ID NO: 2084 - RNA, 21 nt, synthetic construct
  source 1..21: mol_type = other RNA
gctttgagcctcagcttctca

SEQ ID NO: 2085 - RNA, 21 nt, synthetic construct
  source 1..21: mol_type = other RNA
gctttgagcctcagcttctca

SEQ ID NO: 2086 - RNA, 21 nt, synthetic construct
  source 1..21: mol_type = other RNA
actccaccttcctgcaggaga

SEQ ID NO: 2087 - RNA, 21 nt, synthetic construct
  source 1..21: mol_type = other RNA
actccaccttcctgcaggaga

SEQ ID NO: 2088 - RNA, 21 nt, synthetic construct
  source 1..21: mol_type = other RNA
cacagaaactcaataaagtga

SEQ ID NO: 2089 - RNA, 21 nt, synthetic construct
  source 1..21: mol_type = other RNA
cacagaaactcaataaagtga

SEQ ID NO: 2090 - RNA, 21 nt, synthetic construct
  source 1..21: mol_type = other RNA
acagaaactcaataaagtgca

SEQ ID NO: 2091 - RNA, 21 nt, synthetic construct
  source 1..21: mol_type = other RNA
acagaaactcaataaagtgca

SEQ ID NO: 2092 - RNA, 21 nt, synthetic construct
  source 1..21: mol_type = other RNA
cagaaactcaataaagtgcta

SEQ ID NO: 2093 - RNA, 21 nt, synthetic construct
  source 1..21: mol_type = other RNA
cagaaactcaataaagtgcta

SEQ ID NO: 2094 - RNA, 21 nt, synthetic construct
  source 1..21: mol_type = other RNA
agaaactcaataaagtgctta

SEQ ID NO: 2095 - RNA, 21 nt, synthetic construct
  source 1..21: mol_type = other RNA
agaaactcaataaagtgctta

SEQ ID NO: 2096 - RNA, 21 nt, synthetic construct
  source 1..21: mol_type = other RNA
gaaactcaataaagtgcttta

SEQ ID NO: 2097 - RNA, 21 nt, synthetic construct
  source 1..21: mol_type = other RNA
gaaactcaataaagtgcttta

SEQ ID NO: 2098 - RNA, 21 nt, synthetic construct
  source 1..21: mol_type = other RNA
aaactcaataaagtgctttga

SEQ ID NO: 2099 - RNA, 21 nt, synthetic construct
  source 1..21: mol_type = other RNA
aaactcaataaagtgctttga

SEQ ID NO: 2100 - RNA, 21 nt, synthetic construct
  source 1..21: mol_type = other RNA
actcaataaagtgctttgaaa

SEQ ID NO: 2101 - RNA, 21 nt, synthetic construct
  source 1..21: mol_type = other RNA
actcaataaagtgctttgaaa

SEQ ID NO: 2102 - RNA, 21 nt, synthetic construct
  source 1..21: mol_type = other RNA
tcaataaagtgctttgaaaaa

SEQ ID NO: 2103 - RNA, 21 nt, synthetic construct
  source 1..21: mol_type = other RNA
tcaataaagtgctttgaaaaa

SEQ ID NO: 2104 - RNA, 21 nt, synthetic construct
  source 1..21: mol_type = other RNA
aactcaataaagtgctttgaa

SEQ ID NO: 2105 - RNA, 23 nt, synthetic construct
  source 1..23: mol_type = other RNA
tctttcactttcttgggctccaa

SEQ ID NO: 2106 - RNA, 23 nt, synthetic construct
  source 1..23: mol_type = other RNA
tctttcactttcttgggctccaa

SEQ ID NO: 2107 - RNA, 23 nt, synthetic construct
  source 1..23: mol_type = other RNA
ttctttcactttcttgggctcca

SEQ ID NO: 2108 - RNA, 23 nt, synthetic construct
  source 1..23: mol_type = other RNA
ttctttcactttcttgggctcca

SEQ ID NO: 2109 - RNA, 23 nt, synthetic construct
  source 1..23: mol_type = other RNA
tggtctttcactttcttgggctc

SEQ ID NO: 2110 - RNA, 23 nt, synthetic construct
  source 1..23: mol_type = other RNA
tggtctttcactttcttgggctc

SEQ ID NO: 2111 - RNA, 23 nt, synthetic construct
  source 1..23: mol_type = other RNA
ttggtctttcactttcttgggct

SEQ ID NO: 2112 - RNA, 23 nt, synthetic construct
  source 1..23: mol_type = other RNA
ttggtctttcactttcttgggct

SEQ ID NO: 2113 - RNA, 23 nt, synthetic construct
  source 1..23: mol_type = other RNA
tggctcaaagcatttctctttct

SEQ ID NO: 2114 - RNA, 23 nt, synthetic construct
  source 1..23: mol_type = other RNA
tggctcaaagcatttctctttct

SEQ ID NO: 2115 - RNA, 23 nt, synthetic construct
  source 1..23: mol_type = other RNA
taggctcaaagcatttctctttc

SEQ ID NO: 2116 - RNA, 23 nt, synthetic construct
  source 1..23: mol_type = other RNA
taggctcaaagcatttctctttc

SEQ ID NO: 2117 - RNA, 23 nt, synthetic construct
  source 1..23: mol_type = other RNA
tgaggctcaaagcatttctcttt

SEQ ID NO: 2118 - RNA, 23 nt, synthetic construct
  source 1..23: mol_type = other RNA
tgaggctcaaagcatttctcttt

SEQ ID NO: 2119 - RNA, 23 nt, synthetic construct
  source 1..23: mol_type = other RNA
ttgaggctcaaagcatttctctt

SEQ ID NO: 2120 - RNA, 23 nt, synthetic construct
  source 1..23: mol_type = other RNA
ttgaggctcaaagcatttctctt

SEQ ID NO: 2121 - RNA, 23 nt, synthetic construct
  source 1..23: mol_type = other RNA
tctgaggctcaaagcatttctct

SEQ ID NO: 2122 - RNA, 23 nt, synthetic construct
  source 1..23: mol_type = other RNA
tctgaggctcaaagcatttctct

SEQ ID NO: 2123 - RNA, 23 nt, synthetic construct
  source 1..23: mol_type = other RNA
tagctgaggctcaaagcatttct

SEQ ID NO: 2124 - RNA, 23 nt, synthetic construct
  source 1..23: mol_type = other RNA
tagctgaggctcaaagcatttct

SEQ ID NO: 2125 - RNA, 23 nt, synthetic construct
  source 1..23: mol_type = other RNA
tgaagctgaggctcaaagcattt

SEQ ID NO: 2126 - RNA, 23 nt, synthetic construct
  source 1..23: mol_type = other RNA
tgaagctgaggctcaaagcattt

SEQ ID NO: 2127 - RNA, 23 nt, synthetic construct
  source 1..23: mol_type = other RNA
tagaagctgaggctcaaagcatt

SEQ ID NO: 2128 - RNA, 23 nt, synthetic construct
  source 1..23: mol_type = other RNA
tagaagctgaggctcaaagcatt

SEQ ID NO: 2129 - RNA, 23 nt, synthetic construct
  source 1..23: mol_type = other RNA
tgagaagctgaggctcaaagcat

SEQ ID NO: 2130 - RNA, 23 nt, synthetic construct
  source 1..23: mol_type = other RNA
tgagaagctgaggctcaaagcat

SEQ ID NO: 2131 - RNA, 23 nt, synthetic construct
  source 1..23: mol_type = other RNA
tctcctgcaggaaggtggagtat

SEQ ID NO: 2132 - RNA, 23 nt, synthetic construct
  source 1..23: mol_type = other RNA
tctcctgcaggaaggtggagtat

SEQ ID NO: 2133 - RNA, 23 nt, synthetic construct
  source 1..23: mol_type = other RNA
tcactttattgagtttctgtgcc

SEQ ID NO: 2134 - RNA, 23 nt, synthetic construct
  source 1..23: mol_type = other RNA
tcactttattgagtttctgtgcc

SEQ ID NO: 2135 - RNA, 23 nt, synthetic construct
  source 1..23: mol_type = other RNA
tgcactttattgagtttctgtgc

SEQ ID NO: 2136 - RNA, 23 nt, synthetic construct
  source 1..23: mol_type = other RNA
tgcactttattgagtttctgtgc

SEQ ID NO: 2137 - RNA, 23 nt, synthetic construct
  source 1..23: mol_type = other RNA
tagcactttattgagtttctgtg

SEQ ID NO: 2138 - RNA, 23 nt, synthetic construct
  source 1..23: mol_type = other RNA
tagcactttattgagtttctgtg

SEQ ID NO: 2139 - RNA, 23 nt, synthetic construct
  source 1..23: mol_type = other RNA
taagcactttattgagtttctgt

SEQ ID NO: 2140 - RNA, 23 nt, synthetic construct
  source 1..23: mol_type = other RNA
taagcactttattgagtttctgt

SEQ ID NO: 2141 - RNA, 23 nt, synthetic construct
  source 1..23: mol_type = other RNA
taaagcactttattgagtttctg

SEQ ID NO: 2142 - RNA, 23 nt, synthetic construct
  source 1..23: mol_type = other RNA
taaagcactttattgagtttctg

SEQ ID NO: 2143 - RNA, 23 nt, synthetic construct
  source 1..23: mol_type = other RNA
tcaaagcactttattgagtttct

SEQ ID NO: 2144 - RNA, 23 nt, synthetic construct
  source 1..23: mol_type = other RNA
tcaaagcactttattgagtttct

SEQ ID NO: 2145 - RNA, 23 nt, synthetic construct
  source 1..23: mol_type = other RNA
tttcaaagcactttattgagttt

SEQ ID NO: 2146 - RNA, 23 nt, synthetic construct
  source 1..23: mol_type = other RNA
tttcaaagcactttattgagttt

SEQ ID NO: 2147 - RNA, 23 nt, synthetic construct
  source 1..23: mol_type = other RNA
tttttcaaagcactttattgagt

SEQ ID NO: 2148 - RNA, 23 nt, synthetic construct
  source 1..23: mol_type = other RNA
tttttcaaagcactttattgagt

SEQ ID NO: 2149 - RNA, 23 nt, synthetic construct
  source 1..23: mol_type = other RNA
ttcaaagcactttattgagtttc

SEQ ID NO: 2150 - RNA, 21 nt, synthetic construct
  source 1..21: mol_type = other RNA
  modified_base 1: mod_base = OTHER; note = 2'-O-methylguanosine-3'-phosphorothioate
  modified_base 2: mod_base = OTHER; note = 2'-O-methylguanosine-3'-phosphorothioate
  modified_base 3: mod_base = OTHER; note = 2'-O-methyladenosine-3'-phosphate
  modified_base 4: mod_base = OTHER; note = 2'-O-methylguanosine-3'-phosphate
  modified_base 5: mod_base = OTHER; note = 2'-O-methylcytidine-3'-phosphate
  modified_base 6: mod_base = OTHER; note = 2'-O-methylcytidine-3'-phosphate
  modified_base 7: mod_base = OTHER; note = 2'-deoxy-2'-fluorocytidine-3'-phosphate
  modified_base 8: mod_base = OTHER; note = 2'-O-methyladenosine-3'-phosphate
  modified_base 9: mod_base = OTHER; note = 2'-deoxy-2'-fluoroadenosine-3'-phosphate
  modified_base 10: mod_base = OTHER; note = 2'-deoxy-2'-fluoroguanosine-3'-phosphate
  modified_base 11: mod_base = OTHER; note = 2'-deoxy-2'-fluoroadenosine-3'-phosphate
  modified_base 12: mod_base = OTHER; note = 2'-O-methyladenosine-3'-phosphate
  modified_base 13: mod_base = OTHER; note = 2'-O-methyladenosine-3'-phosphate
  modified_base 14: mod_base = OTHER; note = 2'-O-methylguanosine-3'-phosphate
  modified_base 15: mod_base = OTHER; note = 2'-O-methyluridine-3'-phosphate
  modified_base 16: mod_base = OTHER; note = 2'-O-methylguanosine-3'-phosphate
  modified_base 17: mod_base = OTHER; note = 2'-O-methyladenosine-3'-phosphate
  modified_base 18: mod_base = OTHER; note = 2'-O-methyladenosine-3'-phosphate
  modified_base 19: mod_base = OTHER; note = 2'-O-methyladenosine-3'-phosphate
  modified_base 20: mod_base = OTHER; note = 2'-O-methylguanosine-3'-phosphate
  modified_base 21: mod_base = OTHER; note = 2'-O-methyladenosine-3'-phosphate ((2S,4R)-1-[29-[[2-(acetylamino)-2-deoxy-beta-D-galactopyra nosyl]oxy]-14,14-bis[[3-[[3-[[5-[[2-(acetylamino)-2-deoxy-b eta-D-galactopyranosyl]oxy]-1-oxopentyl]amino]propyl]amino] -3-oxopropoxy]methyl]-1,12,19,25-tetraoxo-16-oxa-13,20,24-t riazanonacos-1-yl]-4-hydroxy-2-pyrrolidinyl)methyl ester
ggagcccaagaaagtgaaaga

SEQ ID NO: 2151 - RNA, 21 nt, synthetic construct
  source 1..21: mol_type = other RNA
  modified_base 1: mod_base = OTHER; note = 2'-O-methylguanosine-3'-phosphorothioate
  modified_base 2: mod_base = OTHER; note = 2'-O-methylguanosine-3'-phosphorothioate
  modified_base 3: mod_base = OTHER; note = 2'-O-methyladenosine-3'-phosphate
  modified_base 4: mod_base = OTHER; note = 2'-O-methylguanosine-3'-phosphate
  modified_base 5: mod_base = OTHER; note = 2'-O-methylcytidine-3'-phosphate
  modified_base 6: mod_base = OTHER; note = 2'-O-methylcytidine-3'-phosphate
  modified_base 7: mod_base = OTHER; note = 2'-deoxy-2'-fluorocytidine-3'-phosphate
  modified_base 8: mod_base = OTHER; note = 2'-O-methyladenosine-3'-phosphate
  modified_base 9: mod_base = OTHER; note = 2'-deoxy-2'-fluoroadenosine-3'-phosphate
  modified_base 10: mod_base = OTHER; note = 2'-deoxy-2'-fluoroguanosine-3'-phosphate
  modified_base 11: mod_base = OTHER; note = 2'-deoxy-2'-fluoroadenosine-3'-phosphate
  modified_base 12: mod_base = OTHER; note = 2'-O-methyladenosine-3'-phosphate
  modified_base 13: mod_base = OTHER; note = 2'-O-methyladenosine-3'-phosphate
  modified_base 14: mod_base = OTHER; note = 2'-O-methylguanosine-3'-phosphate
  modified_base 15: mod_base = OTHER; note = 2'-O-methyluridine-3'-phosphate
  modified_base 16: mod_base = OTHER; note = 2'-O-methylguanosine-3'-phosphate
  modified_base 17: mod_base = OTHER; note = 2'-O-methyladenosine-3'-phosphate
  modified_base 18: mod_base = OTHER; note = 2'-O-methyladenosine-3'-phosphate
  modified_base 19: mod_base = OTHER; note = 2'-O-methyladenosine-3'-phosphate
  modified_base 20: mod_base = OTHER; note = 2'-O-methylguanosine-3'-phosphate
  modified_base 21: mod_base = OTHER; note = 2'-O-methyladenosine-3'-phosphate ((2S,4R)-1-[29-[[2-(acetylamino)-2-deoxy-beta-D-galactopyra nosyl]oxy]-14,14-bis[[3-[[3-[[5-[[2-(acetylamino)-2-deoxy-b eta-D-galactopyranosyl]oxy]-1-oxopentyl]amino]propyl]amino] -3-oxopropoxy]methyl]-1,12,19,25-tetraoxo-16-oxa-13,20,24-t riazanonacos-1-yl]-4-hydroxy-2-pyrrolidinyl)methyl ester
ggagcccaagaaagtgaaaga

SEQ ID NO: 2152 - RNA, 21 nt, synthetic construct
  source 1..21: mol_type = other RNA
  modified_base 1: mod_base = OTHER; note = 2'-O-methylguanosine-3'-phosphorothioate
  modified_base 2: mod_base = OTHER; note = 2'-O-methyladenosine-3'-phosphorothioate
  modified_base 3: mod_base = OTHER; note = 2'-O-methylguanosine-3'-phosphate
  modified_base 4: mod_base = OTHER; note = 2'-O-methylcytidine-3'-phosphate
  modified_base 5: mod_base = OTHER; note = 2'-O-methylcytidine-3'-phosphate
  modified_base 6: mod_base = OTHER; note = 2'-O-methylcytidine-3'-phosphate
  modified_base 7: mod_base = OTHER; note = 2'-deoxy-2'-fluoroadenosine-3'-phosphate
  modified_base 8: mod_base = OTHER; note = 2'-O-methyladenosine-3'-phosphate
  modified_base 9: mod_base = OTHER; note = 2'-deoxy-2'-fluoroguanosine-3'-phosphate
  modified_base 10: mod_base = OTHER; note = 2'-deoxy-2'-fluoroadenosine-3'-phosphate
  modified_base 11: mod_base = OTHER; note = 2'-deoxy-2'-fluoroadenosine-3'-phosphate
  modified_base 12: mod_base = OTHER; note = 2'-O-methyladenosine-3'-phosphate
  modified_base 13: mod_base = OTHER; note = 2'-O-methylguanosine-3'-phosphate
  modified_base 14: mod_base = OTHER; note = 2'-O-methyluridine-3'-phosphate
  modified_base 15: mod_base = OTHER; note = 2'-O-methylguanosine-3'-phosphate
  modified_base 16: mod_base = OTHER; note = 2'-O-methyladenosine-3'-phosphate
  modified_base 17: mod_base = OTHER; note = 2'-O-methyladenosine-3'-phosphate
  modified_base 18: mod_base = OTHER; note = 2'-O-methyladenosine-3'-phosphate
  modified_base 19: mod_base = OTHER; note = 2'-O-methylguanosine-3'-phosphate
  modified_base 20: mod_base = OTHER; note = 2'-O-methyladenosine-3'-phosphate
  modified_base 21: mod_base = OTHER; note = 2'-O-methyladenosine-3'-phosphate ((2S,4R)-1-[29-[[2-(acetylamino)-2-deoxy-beta-D-galactopyra nosyl]oxy]-14,14-bis[[3-[[3-[[5-[[2-(acetylamino)-2-deoxy-b eta-D-galactopyranosyl]oxy]-1-oxopentyl]amino]propyl]amino] -3-oxopropoxy]methyl]-1,12,19,25-tetraoxo-16-oxa-13,20,24-t riazanonacos-1-yl]-4-hydroxy-2-pyrrolidinyl)methyl ester
gagcccaagaaagtgaaagaa

SEQ ID NO: 2153 - RNA, 21 nt, synthetic construct
  source 1..21: mol_type = other RNA
  modified_base 1: mod_base = OTHER; note = 2'-O-methylguanosine-3'-phosphorothioate
  modified_base 2: mod_base = OTHER; note = 2'-O-methyladenosine-3'-phosphorothioate
  modified_base 3: mod_base = OTHER; note = 2'-O-methylguanosine-3'-phosphate
  modified_base 4: mod_base = OTHER; note = 2'-O-methylcytidine-3'-phosphate
  modified_base 5: mod_base = OTHER; note = 2'-O-methylcytidine-3'-phosphate
  modified_base 6: mod_base = OTHER; note = 2'-O-methylcytidine-3'-phosphate
  modified_base 7: mod_base = OTHER; note = 2'-deoxy-2'-fluoroadenosine-3'-phosphate
  modified_base 8: mod_base = OTHER; note = 2'-O-methyladenosine-3'-phosphate
  modified_base 9: mod_base = OTHER; note = 2'-deoxy-2'-fluoroguanosine-3'-phosphate
  modified_base 10: mod_base = OTHER; note = 2'-deoxy-2'-fluoroadenosine-3'-phosphate
  modified_base 11: mod_base = OTHER; note = 2'-deoxy-2'-fluoroadenosine-3'-phosphate
  modified_base 12: mod_base = OTHER; note = 2'-O-methyladenosine-3'-phosphate
  modified_base 13: mod_base = OTHER; note = 2'-O-methylguanosine-3'-phosphate
  modified_base 14: mod_base = OTHER; note = 2'-O-methyluridine-3'-phosphate
  modified_base 15: mod_base = OTHER; note = 2'-O-methylguanosine-3'-phosphate
  modified_base 16: mod_base = OTHER; note = 2'-O-methyladenosine-3'-phosphate
  modified_base 17: mod_base = OTHER; note = 2'-O-methyladenosine-3'-phosphate
  modified_base 18: mod_base = OTHER; note = 2'-O-methyladenosine-3'-phosphate
  modified_base 19: mod_base = OTHER; note = 2'-O-methylguanosine-3'-phosphate
  modified_base 20: mod_base = OTHER; note = 2'-O-methyladenosine-3'-phosphate
  modified_base 21: mod_base = OTHER; note = 2'-O-methyladenosine-3'-phosphate ((2S,4R)-1-[29-[[2-(acetylamino)-2-deoxy-beta-D-galactopyra nosyl]oxy]-14,14-bis[[3-[[3-[[5-[[2-(acetylamino)-2-deoxy-b eta-D-galactopyranosyl]oxy]-1-oxopentyl]amino]propyl]amino] -3-oxopropoxy]methyl]-1,12,19,25-tetraoxo-16-oxa-13,20,24-t riazanonacos-1-yl]-4-hydroxy-2-pyrrolidinyl)methyl ester
gagcccaagaaagtgaaagaa

SEQ ID NO: 2154 - RNA, 21 nt, synthetic construct
  source 1..21: mol_type = other RNA
  modified_base 1: mod_base = OTHER; note = 2'-O-methylguanosine-3'-phosphorothioate
  modified_base 2: mod_base = OTHER; note = 2'-O-methylcytidine-3'-phosphorothioate
  modified_base 3: mod_base = OTHER; note = 2'-O-methylcytidine-3'-phosphate
  modified_base 4: mod_base = OTHER; note = 2'-O-methylcytidine-3'-phosphate
  modified_base 5: mod_base = OTHER; note = 2'-O-methyladenosine-3'-phosphate
  modified_base 6: mod_base = OTHER; note = 2'-O-methyladenosine-3'-phosphate
  modified_base 7: mod_base = OTHER; note = 2'-deoxy-2'-fluoroguanosine-3'-phosphate
  modified_base 8: mod_base = OTHER; note = 2'-O-methyladenosine-3'-phosphate
  modified_base 9: mod_base = OTHER; note = 2'-deoxy-2'-fluoroadenosine-3'-phosphate
  modified_base 10: mod_base = OTHER; note = 2'-deoxy-2'-fluoroadenosine-3'-phosphate
  modified_base 11: mod_base = OTHER; note = 2'-deoxy-2'-fluoroguanosine-3'-phosphate
  modified_base 12: mod_base = OTHER; note = 2'-O-methyluridine-3'-phosphate
  modified_base 13: mod_base = OTHER; note = 2'-O-methylguanosine-3'-phosphate
  modified_base 14: mod_base = OTHER; note = 2'-O-methyladenosine-3'-phosphate
  modified_base 15: mod_base = OTHER; note = 2'-O-methyladenosine-3'-phosphate
  modified_base 16: mod_base = OTHER; note = 2'-O-methyladenosine-3'-phosphate
  modified_base 17: mod_base = OTHER; note = 2'-O-methylguanosine-3'-phosphate
  modified_base 18: mod_base = OTHER; note = 2'-O-methyladenosine-3'-phosphate
  modified_base 19: mod_base = OTHER; note = 2'-O-methylcytidine-3'-phosphate
  modified_base 20: mod_base = OTHER; note = 2'-O-methylcytidine-3'-phosphate
  modified_base 21: mod_base = OTHER; note = 2'-O-methyladenosine-3'-phosphate ((2S,4R)-1-[29-[[2-(acetylamino)-2-deoxy-beta-D-galactopyra nosyl]oxy]-14,14-bis[[3-[[3-[[5-[[2-(acetylamino)-2-deoxy-b eta-D-galactopyranosyl]oxy]-1-oxopentyl]amino]propyl]amino] -3-oxopropoxy]methyl]-1,12,19,25-tetraoxo-16-oxa-13,20,24-t riazanonacos-1-yl]-4-hydroxy-2-pyrrolidinyl)methyl ester
gcccaagaaagtgaaagacca

SEQ ID NO: 2155 - RNA, 21 nt, synthetic construct
  source 1..21: mol_type = other RNA
  modified_base 1: mod_base = OTHER; note = 2'-O-methylguanosine-3'-phosphorothioate
  modified_base 2: mod_base = OTHER; note = 2'-O-methylcytidine-3'-phosphorothioate
  modified_base 3: mod_base = OTHER; note = 2'-O-methylcytidine-3'-phosphate
  modified_base 4: mod_base = OTHER; note = 2'-O-methylcytidine-3'-phosphate
  modified_base 5: mod_base = OTHER; note = 2'-O-methyladenosine-3'-phosphate
  modified_base 6: mod_base = OTHER; note = 2'-O-methyladenosine-3'-phosphate
  modified_base 7: mod_base = OTHER; note = 2'-deoxy-2'-fluoroguanosine-3'-phosphate
  modified_base 8: mod_base = OTHER; note = 2'-O-methyladenosine-3'-phosphate
  modified_base 9: mod_base = OTHER; note = 2'-deoxy-2'-fluoroadenosine-3'-phosphate
  modified_base 10: mod_base = OTHER; note = 2'-deoxy-2'-fluoroadenosine-3'-phosphate
  modified_base 11: mod_base = OTHER; note = 2'-deoxy-2'-fluoroguanosine-3'-phosphate
  modified_base 12: mod_base = OTHER; note = 2'-O-methyluridine-3'-phosphate
  modified_base 13: mod_base = OTHER; note = 2'-O-methylguanosine-3'-phosphate
  modified_base 14: mod_base = OTHER; note = 2'-O-methyladenosine-3'-phosphate
  modified_base 15: mod_base = OTHER; note = 2'-O-methyladenosine-3'-phosphate
  modified_base 16: mod_base = OTHER; note = 2'-O-methyladenosine-3'-phosphate
  modified_base 17: mod_base = OTHER; note = 2'-O-methylguanosine-3'-phosphate
  modified_base 18: mod_base = OTHER; note = 2'-O-methyladenosine-3'-phosphate
  modified_base 19: mod_base = OTHER; note = 2'-O-methylcytidine-3'-phosphate
  modified_base 20: mod_base = OTHER; note = 2'-O-methylcytidine-3'-phosphate
  modified_base 21: mod_base = OTHER; note = 2'-O-methyladenosine-3'-phosphate ((2S,4R)-1-[29-[[2-(acetylamino)-2-deoxy-beta-D-galactopyra nosyl]oxy]-14,14-bis[[3-[[3-[[5-[[2-(acetylamino)-2-deoxy-b eta-D-galactopyranosyl]oxy]-1-oxopentyl]amino]propyl]amino] -3-oxopropoxy]methyl]-1,12,19,25-tetraoxo-16-oxa-13,20,24-t riazanonacos-1-yl]-4-hydroxy-2-pyrrolidinyl)methyl ester
gcccaagaaagtgaaagacca

SEQ ID NO: 2156 - RNA, 21 nt, synthetic construct
  source 1..21: mol_type = other RNA
  modified_base 1: mod_base = OTHER; note = 2'-O-methylcytidine-3'-phosphorothioate
  modified_base 2: mod_base = OTHER; note = 2'-O-methylcytidine-3'-phosphorothioate
  modified_base 3: mod_base = OTHER; note = 2'-O-methylcytidine-3'-phosphate
  modified_base 4: mod_base = OTHER; note = 2'-O-methyladenosine-3'-phosphate
  modified_base 5: mod_base = OTHER; note = 2'-O-methyladenosine-3'-phosphate
  modified_base 6: mod_base = OTHER; note = 2'-O-methylguanosine-3'-phosphate
  modified_base 7: mod_base = OTHER; note = 2'-deoxy-2'-fluoroadenosine-3'-phosphate
  modified_base 8: mod_base = OTHER; note = 2'-O-methyladenosine-3'-phosphate
  modified_base 9: mod_base = OTHER; note = 2'-deoxy-2'-fluoroadenosine-3'-phosphate
  modified_base 10: mod_base = OTHER; note = 2'-deoxy-2'-fluoroguanosine-3'-phosphate
  modified_base 11: mod_base = OTHER; note = 2'-deoxy-2'-fluorouridine-3'-phosphate
  modified_base 12: mod_base = OTHER; note = 2'-O-methylguanosine-3'-phosphate
  modified_base 13: mod_base = OTHER; note = 2'-O-methyladenosine-3'-phosphate
  modified_base 14: mod_base = OTHER; note = 2'-O-methyladenosine-3'-phosphate
  modified_base 15: mod_base = OTHER; note = 2'-O-methyladenosine-3'-phosphate
  modified_base 16: mod_base = OTHER; note = 2'-O-methylguanosine-3'-phosphate
  modified_base 17: mod_base = OTHER; note = 2'-O-methyladenosine-3'-phosphate
  modified_base 18: mod_base = OTHER; note = 2'-O-methylcytidine-3'-phosphate
  modified_base 19: mod_base = OTHER; note = 2'-O-methylcytidine-3'-phosphate
  modified_base 20: mod_base = OTHER; note = 2'-O-methyladenosine-3'-phosphate
  modified_base 21: mod_base = OTHER; note = 2'-O-methyladenosine-3'-phosphate ((2S,4R)-1-[29-[[2-(acetylamino)-2-deoxy-beta-D-galactopyra nosyl]oxy]-14,14-bis[[3-[[3-[[5-[[2-(acetylamino)-2-deoxy-b eta-D-galactopyranosyl]oxy]-1-oxopentyl]amino]propyl]amino] -3-oxopropoxy]methyl]-1,12,19,25-tetraoxo-16-oxa-13,20,24-t riazanonacos-1-yl]-4-hydroxy-2-pyrrolidinyl)methyl ester
cccaagaaagtgaaagaccaa

SEQ ID NO: 2157 - RNA, 21 nt, synthetic construct
  source 1..21: mol_type = other RNA
  modified_base 1: mod_base = OTHER; note = 2'-O-methylcytidine-3'-phosphorothioate
  modified_base 2: mod_base = OTHER; note = 2'-O-methylcytidine-3'-phosphorothioate
  modified_base 3: mod_base = OTHER; note = 2'-O-methylcytidine-3'-phosphate
  modified_base 4: mod_base = OTHER; note = 2'-O-methyladenosine-3'-phosphate
  modified_base 5: mod_base = OTHER; note = 2'-O-methyladenosine-3'-phosphate
  modified_base 6: mod_base = OTHER; note = 2'-O-methylguanosine-3'-phosphate
  modified_base 7: mod_base = OTHER; note = 2'-deoxy-2'-fluoroadenosine-3'-phosphate
  modified_base 8: mod_base = OTHER; note = 2'-O-methyladenosine-3'-phosphate
  modified_base 9: mod_base = OTHER; note = 2'-deoxy-2'-fluoroadenosine-3'-phosphate
  modified_base 10: mod_base = OTHER; note = 2'-deoxy-2'-fluoroguanosine-3'-phosphate
  modified_base 11: mod_base = OTHER; note = 2'-deoxy-2'-fluorouridine-3'-phosphate
  modified_base 12: mod_base = OTHER; note = 2'-O-methylguanosine-3'-phosphate
  modified_base 13: mod_base = OTHER; note = 2'-O-methyladenosine-3'-phosphate
  modified_base 14: mod_base = OTHER; note = 2'-O-methyladenosine-3'-phosphate
  modified_base 15: mod_base = OTHER; note = 2'-O-methyladenosine-3'-phosphate
  modified_base 16: mod_base = OTHER; note = 2'-O-methylguanosine-3'-phosphate
  modified_base 17: mod_base = OTHER; note = 2'-O-methyladenosine-3'-phosphate
  modified_base 18: mod_base = OTHER; note = 2'-O-methylcytidine-3'-phosphate
  modified_base 19: mod_base = OTHER; note = 2'-O-methylcytidine-3'-phosphate
  modified_base 20: mod_base = OTHER; note = 2'-O-methyladenosine-3'-phosphate
  modified_base 21: mod_base = OTHER; note = 2'-O-methyladenosine-3'-phosphate ((2S,4R)-1-[29-[[2-(acetylamino)-2-deoxy-beta-D-galactopyra nosyl]oxy]-14,14-bis[[3-[[3-[[5-[[2-(acetylamino)-2-deoxy-b eta-D-galactopyranosyl]oxy]-1-oxopentyl]amino]propyl]amino] -3-oxopropoxy]methyl]-1,12,19,25-tetraoxo-16-oxa-13,20,24-t riazanonacos-1-yl]-4-hydroxy-2-pyrrolidinyl)methyl ester
cccaagaaagtgaaagaccaa

SEQ ID NO: 2158 - RNA, 21 nt, synthetic construct
  source 1..21: mol_type = other RNA
  modified_base 1: mod_base = OTHER; note = 2'-O-methyladenosine-3'-phosphorothioate
  modified_base 2: mod_base = OTHER; note = 2'-O-methyladenosine-3'-phosphorothioate
  modified_base 3: mod_base = OTHER; note = 2'-O-methyladenosine-3'-phosphate
  modified_base 4: mod_base = OTHER; note = 2'-O-methylguanosine-3'-phosphate
  modified_base 5: mod_base = OTHER; note = 2'-O-methyladenosine-3'-phosphate
  modified_base 6: mod_base = OTHER; note = 2'-O-methylguanosine-3'-phosphate
  modified_base 7: mod_base = OTHER; note = 2'-deoxy-2'-fluoroadenosine-3'-phosphate
  modified_base 8: mod_base = OTHER; note = 2'-O-methyladenosine-3'-phosphate
  modified_base 9: mod_base = OTHER; note = 2'-deoxy-2'-fluoroadenosine-3'-phosphate
  modified_base 10: mod_base = OTHER; note = 2'-deoxy-2'-fluorouridine-3'-phosphate
  modified_base 11: mod_base = OTHER; note = 2'-deoxy-2'-fluoroguanosine-3'-phosphate
  modified_base 12: mod_base = OTHER; note = 2'-O-methylcytidine-3'-phosphate
  modified_base 13: mod_base = OTHER; note = 2'-O-methyluridine-3'-phosphate
  modified_base 14: mod_base = OTHER; note = 2'-O-methyluridine-3'-phosphate
  modified_base 15: mod_base = OTHER; note = 2'-O-methyluridine-3'-phosphate
  modified_base 16: mod_base = OTHER; note = 2'-O-methylguanosine-3'-phosphate
  modified_base 17: mod_base = OTHER; note = 2'-O-methyladenosine-3'-phosphate
  modified_base 18: mod_base = OTHER; note = 2'-O-methylguanosine-3'-phosphate
  modified_base 19: mod_base = OTHER; note = 2'-O-methylcytidine-3'-phosphate
  modified_base 20: mod_base = OTHER; note = 2'-O-methylcytidine-3'-phosphate
  modified_base 21: mod_base = OTHER; note = 2'-O-methyladenosine-3'-phosphate ((2S,4R)-1-[29-[[2-(acetylamino)-2-deoxy-beta-D-galactopyra nosyl]oxy]-14,14-bis[[3-[[3-[[5-[[2-(acetylamino)-2-deoxy-b eta-D-galactopyranosyl]oxy]-1-oxopentyl]amino]propyl]amino] -3-oxopropoxy]methyl]-1,12,19,25-tetraoxo-16-oxa-13,20,24-t riazanonacos-1-yl]-4-hydroxy-2-pyrrolidinyl)methyl ester
aaagagaaatgctttgagcca

SEQ ID NO: 2159 - RNA, 21 nt, synthetic construct
  source 1..21: mol_type = other RNA
  modified_base 1: mod_base = OTHER; note = 2'-O-methyladenosine-3'-phosphorothioate
  modified_base 2: mod_base = OTHER; note = 2'-O-methyladenosine-3'-phosphorothioate
  modified_base 3: mod_base = OTHER; note = 2'-O-methyladenosine-3'-phosphate
  modified_base 4: mod_base = OTHER; note = 2'-O-methylguanosine-3'-phosphate
  modified_base 5: mod_base = OTHER; note = 2'-O-methyladenosine-3'-phosphate
  modified_base 6: mod_base = OTHER; note = 2'-O-methylguanosine-3'-phosphate
  modified_base 7: mod_base = OTHER; note = 2'-deoxy-2'-fluoroadenosine-3'-phosphate
  modified_base 8: mod_base = OTHER; note = 2'-O-methyladenosine-3'-phosphate
  modified_base 9: mod_base = OTHER; note = 2'-deoxy-2'-fluoroadenosine-3'-phosphate
  modified_base 10: mod_base = OTHER; note = 2'-deoxy-2'-fluorouridine-3'-phosphate
  modified_base 11: mod_base = OTHER; note = 2'-deoxy-2'-fluoroguanosine-3'-phosphate
  modified_base 12: mod_base = OTHER; note = 2'-O-methylcytidine-3'-phosphate
  modified_base 13: mod_base = OTHER; note = 2'-O-methyluridine-3'-phosphate
  modified_base 14: mod_base = OTHER; note = 2'-O-methyluridine-3'-phosphate
  modified_base 15: mod_base = OTHER; note = 2'-O-methyluridine-3'-phosphate
  modified_base 16: mod_base = OTHER; note = 2'-O-methylguanosine-3'-phosphate
  modified_base 17: mod_base = OTHER; note = 2'-O-methyladenosine-3'-phosphate
  modified_base 18: mod_base = OTHER; note = 2'-O-methylguanosine-3'-phosphate
  modified_base 19: mod_base = OTHER; note = 2'-O-methylcytidine-3'-phosphate
  modified_base 20: mod_base = OTHER; note = 2'-O-methylcytidine-3'-phosphate
  modified_base 21: mod_base = OTHER; note = 2'-O-methyladenosine-3'-phosphate ((2S,4R)-1-[29-[[2-(acetylamino)-2-deoxy-beta-D-galactopyra nosyl]oxy]-14,14-bis[[3-[[3-[[5-[[2-(acetylamino)-2-deoxy-b eta-D-galactopyranosyl]oxy]-1-oxopentyl]amino]propyl]amino] -3-oxopropoxy]methyl]-1,12,19,25-tetraoxo-16-oxa-13,20,24-t riazanonacos-1-yl]-4-hydroxy-2-pyrrolidinyl)methyl ester
aaagagaaatgctttgagcca

SEQ ID NO: 2160 - RNA, 21 nt, synthetic construct
  source 1..21: mol_type = other RNA
  modified_base 1: mod_base = OTHER; note = 2'-O-methyladenosine-3'-phosphorothioate
  modified_base 2: mod_base = OTHER; note = 2'-O-methyladenosine-3'-phosphorothioate
  modified_base 3: mod_base = OTHER; note = 2'-O-methylguanosine-3'-phosphate
  modified_base 4: mod_base = OTHER; note = 2'-O-methyladenosine-3'-phosphate
  modified_base 5: mod_base = OTHER; note = 2'-O-methylguanosine-3'-phosphate
  modified_base 6: mod_base = OTHER; note = 2'-O-methyladenosine-3'-phosphate
  modified_base 7: mod_base = OTHER; note = 2'-deoxy-2'-fluoroadenosine-3'-phosphate
  modified_base 8: mod_base = OTHER; note = 2'-O-methyladenosine-3'-phosphate
  modified_base 9: mod_base = OTHER; note = 2'-deoxy-2'-fluorouridine-3'-phosphate
  modified_base 10: mod_base = OTHER; note = 2'-deoxy-2'-fluoroguanosine-3'-phosphate
  modified_base 11: mod_base = OTHER; note = 2'-deoxy-2'-fluorocytidine-3'-phosphate
  modified_base 12: mod_base = OTHER; note = 2'-O-methyluridine-3'-phosphate
  modified_base 13: mod_base = OTHER; note = 2'-O-methyluridine-3'-phosphate
  modified_base 14: mod_base = OTHER; note = 2'-O-methyluridine-3'-phosphate
  modified_base 15: mod_base = OTHER; note = 2'-O-methylguanosine-3'-phosphate
  modified_base 16: mod_base = OTHER; note = 2'-O-methyladenosine-3'-phosphate
  modified_base 17: mod_base = OTHER; note = 2'-O-methylguanosine-3'-phosphate
  modified_base 18: mod_base = OTHER; note = 2'-O-methylcytidine-3'-phosphate
  modified_base 19: mod_base = OTHER; note = 2'-O-methylcytidine-3'-phosphate
  modified_base 20: mod_base = OTHER; note = 2'-O-methyluridine-3'-phosphate
  modified_base 21: mod_base = OTHER; note = 2'-O-methyladenosine-3'-phosphate ((2S,4R)-1-[29-[[2-(acetylamino)-2-deoxy-beta-D-galactopyra nosyl]oxy]-14,14-bis[[3-[[3-[[5-[[2-(acetylamino)-2-deoxy-b eta-D-galactopyranosyl]oxy]-1-oxopentyl]amino]propyl]amino] -3-oxopropoxy]methyl]-1,12,19,25-tetraoxo-16-oxa-13,20,24-t riazanonacos-1-yl]-4-hydroxy-2-pyrrolidinyl)methyl ester
aagagaaatgctttgagccta

SEQ ID NO: 2161 - RNA, 21 nt, synthetic construct
  source 1..21: mol_type = other RNA
  modified_base 1: mod_base = OTHER; note = 2'-O-methyladenosine-3'-phosphorothioate
  modified_base 2: mod_base = OTHER; note = 2'-O-methyladenosine-3'-phosphorothioate
  modified_base 3: mod_base = OTHER; note = 2'-O-methylguanosine-3'-phosphate
  modified_base 4: mod_base = OTHER; note = 2'-O-methyladenosine-3'-phosphate
  modified_base 5: mod_base = OTHER; note = 2'-O-methylguanosine-3'-phosphate
  modified_base 6: mod_base = OTHER; note = 2'-O-methyladenosine-3'-phosphate
  modified_base 7: mod_base = OTHER; note = 2'-deoxy-2'-fluoroadenosine-3'-phosphate
  modified_base 8: mod_base = OTHER; note = 2'-O-methyladenosine-3'-phosphate
  modified_base 9: mod_base = OTHER; note = 2'-deoxy-2'-fluorouridine-3'-phosphate
  modified_base 10: mod_base = OTHER; note = 2'-deoxy-2'-fluoroguanosine-3'-phosphate
  modified_base 11: mod_base = OTHER; note = 2'-deoxy-2'-fluorocytidine-3'-phosphate
  modified_base 12: mod_base = OTHER; note = 2'-O-methyluridine-3'-phosphate
  modified_base 13: mod_base = OTHER; note = 2'-O-methyluridine-3'-phosphate
  modified_base 14: mod_base = OTHER; note = 2'-O-methyluridine-3'-phosphate
  modified_base 15: mod_base = OTHER; note = 2'-O-methylguanosine-3'-phosphate
  modified_base 16: mod_base = OTHER; note = 2'-O-methyladenosine-3'-phosphate
  modified_base 17: mod_base = OTHER; note = 2'-O-methylguanosine-3'-phosphate
  modified_base 18: mod_base = OTHER; note = 2'-O-methylcytidine-3'-phosphate
  modified_base 19: mod_base = OTHER; note = 2'-O-methylcytidine-3'-phosphate
  modified_base 20: mod_base = OTHER; note = 2'-O-methyluridine-3'-phosphate
  modified_base 21: mod_base = OTHER; note = 2'-O-methyladenosine-3'-phosphate ((2S,4R)-1-[29-[[2-(acetylamino)-2-deoxy-beta-D-galactopyra nosyl]oxy]-14,14-bis[[3-[[3-[[5-[[2-(acetylamino)-2-deoxy-b eta-D-galactopyranosyl]oxy]-1-oxopentyl]amino]propyl]amino] -3-oxopropoxy]methyl]-1,12,19,25-tetraoxo-16-oxa-13,20,24-t riazanonacos-1-yl]-4-hydroxy-2-pyrrolidinyl)methyl ester
aagagaaatgctttgagccta

SEQ ID NO: 2162 - RNA, 21 nt, synthetic construct
  source 1..21: mol_type = other RNA
  modified_base 1: mod_base = OTHER; note = 2'-O-methyladenosine-3'-phosphorothioate
  modified_base 2: mod_base = OTHER; note = 2'-O-methylguanosine-3'-phosphorothioate
  modified_base 3: mod_base = OTHER; note = 2'-O-methyladenosine-3'-phosphate
  modified_base 4: mod_base = OTHER; note = 2'-O-methylguanosine-3'-phosphate
  modified_base 5: mod_base = OTHER; note = 2'-O-methyladenosine-3'-phosphate
  modified_base 6: mod_base = OTHER; note = 2'-O-methyladenosine-3'-phosphate
  modified_base 7: mod_base = OTHER; note = 2'-deoxy-2'-fluoroadenosine-3'-phosphate
  modified_base 8: mod_base = OTHER; note = 2'-O-methyluridine-3'-phosphate
  modified_base 9: mod_base = OTHER; note = 2'-deoxy-2'-fluoroguanosine-3'-phosphate
  modified_base 10: mod_base = OTHER; note = 2'-deoxy-2'-fluorocytidine-3'-phosphate
  modified_base 11: mod_base = OTHER; note = 2'-deoxy-2'-fluorouridine-3'-phosphate
  modified_base 12: mod_base = OTHER; note = 2'-O-methyluridine-3'-phosphate
  modified_base 13: mod_base = OTHER; note = 2'-O-methyluridine-3'-phosphate
  modified_base 14: mod_base = OTHER; note = 2'-O-methylguanosine-3'-phosphate
  modified_base 15: mod_base = OTHER; note = 2'-O-methyladenosine-3'-phosphate
  modified_base 16: mod_base = OTHER; note = 2'-O-methylguanosine-3'-phosphate
  modified_base 17: mod_base = OTHER; note = 2'-O-methylcytidine-3'-phosphate
  modified_base 18: mod_base = OTHER; note = 2'-O-methylcytidine-3'-phosphate
  modified_base 19: mod_base = OTHER; note = 2'-O-methyluridine-3'-phosphate
  modified_base 20: mod_base = OTHER; note = 2'-O-methylcytidine-3'-phosphate
  modified_base 21: mod_base = OTHER; note = 2'-O-methyladenosine-3'-phosphate ((2S,4R)-1-[29-[[2-(acetylamino)-2-deoxy-beta-D-galactopyra nosyl]oxy]-14,14-bis[[3-[[3-[[5-[[2-(acetylamino)-2-deoxy-b eta-D-galactopyranosyl]oxy]-1-oxopentyl]amino]propyl]amino] -3-oxopropoxy]methyl]-1,12,19,25-tetraoxo-16-oxa-13,20,24-t riazanonacos-1-yl]-4-hydroxy-2-pyrrolidinyl)methyl ester
agagaaatgctttgagcctca

SEQ ID NO: 2163 - RNA, 21 nt, synthetic construct
  source 1..21: mol_type = other RNA
  modified_base 1: mod_base = OTHER; note = 2'-O-methyladenosine-3'-phosphorothioate
  modified_base 2: mod_base = OTHER; note = 2'-O-methylguanosine-3'-phosphorothioate
  modified_base 3: mod_base = OTHER; note = 2'-O-methyladenosine-3'-phosphate
  modified_base 4: mod_base = OTHER; note = 2'-O-methylguanosine-3'-phosphate
  modified_base 5: mod_base = OTHER; note = 2'-O-methyladenosine-3'-phosphate
  modified_base 6: mod_base = OTHER; note = 2'-O-methyladenosine-3'-phosphate
  modified_base 7: mod_base = OTHER; note = 2'-deoxy-2'-fluoroadenosine-3'-phosphate
  modified_base 8: mod_base = OTHER; note = 2'-O-methyluridine-3'-phosphate
  modified_base 9: mod_base = OTHER; note = 2'-deoxy-2'-fluoroguanosine-3'-phosphate
  modified_base 10: mod_base = OTHER; note = 2'-deoxy-2'-fluorocytidine-3'-phosphate
  modified_base 11: mod_base = OTHER; note = 2'-deoxy-2'-fluorouridine-3'-phosphate
  modified_base 12: mod_base = OTHER; note = 2'-O-methyluridine-3'-phosphate
  modified_base 13: mod_base = OTHER; note = 2'-O-methyluridine-3'-phosphate
  modified_base 14: mod_base = OTHER; note = 2'-O-methylguanosine-3'-phosphate
  modified_base 15: mod_base = OTHER; note = 2'-O-methyladenosine-3'-phosphate
  modified_base 16: mod_base = OTHER; note = 2'-O-methylguanosine-3'-phosphate
  modified_base 17: mod_base = OTHER; note = 2'-O-methylcytidine-3'-phosphate
  modified_base 18: mod_base = OTHER; note = 2'-O-methylcytidine-3'-phosphate
  modified_base 19: mod_base = OTHER; note = 2'-O-methyluridine-3'-phosphate
  modified_base 20: mod_base = OTHER; note = 2'-O-methylcytidine-3'-phosphate
  modified_base 21: mod_base = OTHER; note = 2'-O-methyladenosine-3'-phosphate ((2S,4R)-1-[29-[[2-(acetylamino)-2-deoxy-beta-D-galactopyra nosyl]oxy]-14,14-bis[[3-[[3-[[5-[[2-(acetylamino)-2-deoxy-b eta-D-galactopyranosyl]oxy]-1-oxopentyl]amino]propyl]amino] -3-oxopropoxy]methyl]-1,12,19,25-tetraoxo-16-oxa-13,20,24-t riazanonacos-1-yl]-4-hydroxy-2-pyrrolidinyl)methyl ester
agagaaatgctttgagcctca

SEQ ID NO: 2164 - RNA, 21 nt, synthetic construct
  source 1..21: mol_type = other RNA
  modified_base 1: mod_base = OTHER; note = 2'-O-methylguanosine-3'-phosphorothioate
  modified_base 2: mod_base = OTHER; note = 2'-O-methyladenosine-3'-phosphorothioate
  modified_base 3: mod_base = OTHER; note = 2'-O-methylguanosine-3'-phosphate
  modified_base 4: mod_base = OTHER; note = 2'-O-methyladenosine-3'-phosphate
  modified_base 5: mod_base = OTHER; note = 2'-O-methyladenosine-3'-phosphate
  modified_base 6: mod_base = OTHER; note = 2'-O-methyladenosine-3'-phosphate
  modified_base 7: mod_base = OTHER; note = 2'-deoxy-2'-fluorouridine-3'-phosphate
  modified_base 8: mod_base = OTHER; note = 2'-O-methylguanosine-3'-phosphate
  modified_base 9: mod_base = OTHER; note = 2'-deoxy-2'-fluorocytidine-3'-phosphate
  modified_base 10: mod_base = OTHER; note = 2'-deoxy-2'-fluorouridine-3'-phosphate
  modified_base 11: mod_base = OTHER; note = 2'-deoxy-2'-fluorouridine-3'-phosphate
  modified_base 12: mod_base = OTHER; note = 2'-O-methyluridine-3'-phosphate
  modified_base 13: mod_base = OTHER; note = 2'-O-methylguanosine-3'-phosphate
  modified_base 14: mod_base = OTHER; note = 2'-O-methyladenosine-3'-phosphate
  modified_base 15: mod_base = OTHER; note = 2'-O-methylguanosine-3'-phosphate
  modified_base 16: mod_base = OTHER; note = 2'-O-methylcytidine-3'-phosphate
  modified_base 17: mod_base = OTHER; note = 2'-O-methylcytidine-3'-phosphate
  modified_base 18: mod_base = OTHER; note = 2'-O-methyluridine-3'-phosphate
  modified_base 19: mod_base = OTHER; note = 2'-O-methylcytidine-3'-phosphate
  modified_base 20: mod_base = OTHER; note = 2'-O-methyladenosine-3'-phosphate
  modified_base 21: mod_base = OTHER; note = 2'-O-methyladenosine-3'-phosphate ((2S,4R)-1-[29-[[2-(acetylamino)-2-deoxy-beta-D-galactopyra nosyl]oxy]-14,14-bis[[3-[[3-[[5-[[2-(acetylamino)-2-deoxy-b eta-D-galactopyranosyl]oxy]-1-oxopentyl]amino]propyl]amino] -3-oxopropoxy]methyl]-1,12,19,25-tetraoxo-16-oxa-13,20,24-t riazanonacos-1-yl]-4-hydroxy-2-pyrrolidinyl)methyl ester
gagaaatgctttgagcctcaa

SEQ ID NO: 2165 - RNA, 21 nt, synthetic construct
  source 1..21: mol_type = other RNA
  modified_base 1: mod_base = OTHER; note = 2'-O-methylguanosine-3'-phosphorothioate
  modified_base 2: mod_base = OTHER; note = 2'-O-methyladenosine-3'-phosphorothioate
  modified_base 3: mod_base = OTHER; note = 2'-O-methylguanosine-3'-phosphate
  modified_base 4: mod_base = OTHER; note = 2'-O-methyladenosine-3'-phosphate
  modified_base 5: mod_base = OTHER; note = 2'-O-methyladenosine-3'-phosphate
  modified_base 6: mod_base = OTHER; note = 2'-O-methyladenosine-3'-phosphate
  modified_base 7: mod_base = OTHER; note = 2'-deoxy-2'-fluorouridine-3'-phosphate
  modified_base 8: mod_base = OTHER; note = 2'-O-methylguanosine-3'-phosphate
  modified_base 9: mod_base = OTHER; note = 2'-deoxy-2'-fluorocytidine-3'-phosphate
  modified_base 10: mod_base = OTHER; note = 2'-deoxy-2'-fluorouridine-3'-phosphate
  modified_base 11: mod_base = OTHER; note = 2'-deoxy-2'-fluorouridine-3'-phosphate
  modified_base 12: mod_base = OTHER; note = 2'-O-methyluridine-3'-phosphate
  modified_base 13: mod_base = OTHER; note = 2'-O-methylguanosine-3'-phosphate
  modified_base 14: mod_base = OTHER; note = 2'-O-methyladenosine-3'-phosphate
  modified_base 15: mod_base = OTHER; note = 2'-O-methylguanosine-3'-phosphate
  modified_base 16: mod_base = OTHER; note = 2'-O-methylcytidine-3'-phosphate
  modified_base 17: mod_base = OTHER; note = 2'-O-methylcytidine-3'-phosphate
  modified_base 18: mod_base = OTHER; note = 2'-O-methyluridine-3'-phosphate
  modified_base 19: mod_base = OTHER; note = 2'-O-methylcytidine-3'-phosphate
  modified_base 20: mod_base = OTHER; note = 2'-O-methyladenosine-3'-phosphate
  modified_base 21: mod_base = OTHER; note = 2'-O-methyladenosine-3'-phosphate ((2S,4R)-1-[29-[[2-(acetylamino)-2-deoxy-beta-D-galactopyra nosyl]oxy]-14,14-bis[[3-[[3-[[5-[[2-(acetylamino)-2-deoxy-b eta-D-galactopyranosyl]oxy]-1-oxopentyl]amino]propyl]amino] -3-oxopropoxy]methyl]-1,12,19,25-tetraoxo-16-oxa-13,20,24-t riazanonacos-1-yl]-4-hydroxy-2-pyrrolidinyl)methyl ester
gagaaatgctttgagcctcaa

SEQ ID NO: 2166 - RNA, 21 nt, synthetic construct
  source 1..21: mol_type = other RNA
  modified_base 1: mod_base = OTHER; note = 2'-O-methyladenosine-3'-phosphorothioate
  modified_base 2: mod_base = OTHER; note = 2'-O-methylguanosine-3'-phosphorothioate
  modified_base 3: mod_base = OTHER; note = 2'-O-methyladenosine-3'-phosphate
  modified_base 4: mod_base = OTHER; note = 2'-O-methyladenosine-3'-phosphate
  modified_base 5: mod_base = OTHER; note = 2'-O-methyladenosine-3'-phosphate
  modified_base 6: mod_base = OTHER; note = 2'-O-methyluridine-3'-phosphate
  modified_base 7: mod_base = OTHER; note = 2'-deoxy-2'-fluoroguanosine-3'-phosphate
  modified_base 8: mod_base = OTHER; note = 2'-O-methylcytidine-3'-phosphate
  modified_base 9: mod_base = OTHER; note = 2'-deoxy-2'-fluorouridine-3'-phosphate
  modified_base 10: mod_base = OTHER; note = 2'-deoxy-2'-fluorouridine-3'-phosphate
  modified_base 11: mod_base = OTHER; note = 2'-deoxy-2'-fluorouridine-3'-phosphate
  modified_base 12: mod_base = OTHER; note = 2'-O-methylguanosine-3'-phosphate
  modified_base 13: mod_base = OTHER; note = 2'-O-methyladenosine-3'-phosphate
  modified_base 14: mod_base = OTHER; note = 2'-O-methylguanosine-3'-phosphate
  modified_base 15: mod_base = OTHER; note = 2'-O-methylcytidine-3'-phosphate
  modified_base 16: mod_base = OTHER; note = 2'-O-methylcytidine-3'-phosphate
  modified_base 17: mod_base = OTHER; note = 2'-O-methyluridine-3'-phosphate
  modified_base 18: mod_base = OTHER; note = 2'-O-methylcytidine-3'-phosphate
  modified_base 19: mod_base = OTHER; note = 2'-O-methyladenosine-3'-phosphate
  modified_base 20: mod_base = OTHER; note = 2'-O-methylguanosine-3'-phosphate
  modified_base 21: mod_base = OTHER; note = 2'-O-methyladenosine-3'-phosphate ((2S,4R)-1-[29-[[2-(acetylamino)-2-deoxy-beta-D-galactopyra nosyl]oxy]-14,14-bis[[3-[[3-[[5-[[2-(acetylamino)-2-deoxy-b eta-D-galactopyranosyl]oxy]-1-oxopentyl]amino]propyl]amino] -3-oxopropoxy]methyl]-1,12,19,25-tetraoxo-16-oxa-13,20,24-t riazanonacos-1-yl]-4-hydroxy-2-pyrrolidinyl)methyl ester
agaaatgctttgagcctcaga

SEQ ID NO: 2167 - RNA, 21 nt, synthetic construct
  source 1..21: mol_type = other RNA
  modified_base 1: mod_base = OTHER; note = 2'-O-methyladenosine-3'-phosphorothioate
  modified_base 2: mod_base = OTHER; note = 2'-O-methylguanosine-3'-phosphorothioate
  modified_base 3: mod_base = OTHER; note = 2'-O-methyladenosine-3'-phosphate
  modified_base 4: mod_base = OTHER; note = 2'-O-methyladenosine-3'-phosphate
  modified_base 5: mod_base = OTHER; note = 2'-O-methyladenosine-3'-phosphate
  modified_base 6: mod_base = OTHER; note = 2'-O-methyluridine-3'-phosphate
  modified_base 7: mod_base = OTHER; note = 2'-deoxy-2'-fluoroguanosine-3'-phosphate
  modified_base 8: mod_base = OTHER; note = 2'-O-methylcytidine-3'-phosphate
  modified_base 9: mod_base = OTHER; note = 2'-deoxy-2'-fluorouridine-3'-phosphate
  modified_base 10: mod_base = OTHER; note = 2'-deoxy-2'-fluorouridine-3'-phosphate
  modified_base 11: mod_base = OTHER; note = 2'-deoxy-2'-fluorouridine-3'-phosphate
  modified_base 12: mod_base = OTHER; note = 2'-O-methylguanosine-3'-phosphate
  modified_base 13: mod_base = OTHER; note = 2'-O-methyladenosine-3'-phosphate
  modified_base 14: mod_base = OTHER; note = 2'-O-methylguanosine-3'-phosphate
  modified_base 15: mod_base = OTHER; note = 2'-O-methylcytidine-3'-phosphate
  modified_base 16: mod_base = OTHER; note = 2'-O-methylcytidine-3'-phosphate
  modified_base 17: mod_base = OTHER; note = 2'-O-methyluridine-3'-phosphate
  modified_base 18: mod_base = OTHER; note = 2'-O-methylcytidine-3'-phosphate
  modified_base 19: mod_base = OTHER; note = 2'-O-methyladenosine-3'-phosphate
  modified_base 20: mod_base = OTHER; note = 2'-O-methylguanosine-3'-phosphate
  modified_base 21: mod_base = OTHER; note = 2'-O-methyladenosine-3'-phosphate ((2S,4R)-1-[29-[[2-(acetylamino)-2-deoxy-beta-D-galactopyra nosyl]oxy]-14,14-bis[[3-[[3-[[5-[[2-(acetylamino)-2-deoxy-b eta-D-galactopyranosyl]oxy]-1-oxopentyl]amino]propyl]amino] -3-oxopropoxy]methyl]-1,12,19,25-tetraoxo-16-oxa-13,20,24-t riazanonacos-1-yl]-4-hydroxy-2-pyrrolidinyl)methyl ester
agaaatgctttgagcctcaga

SEQ ID NO: 2168 - RNA, 21 nt, synthetic construct
  source 1..21: mol_type = other RNA
  modified_base 1: mod_base = OTHER; note = 2'-O-methyladenosine-3'-phosphorothioate
  modified_base 2: mod_base = OTHER; note = 2'-O-methyladenosine-3'-phosphorothioate
  modified_base 3: mod_base = OTHER; note = 2'-O-methyladenosine-3'-phosphate
  modified_base 4: mod_base = OTHER; note = 2'-O-methyluridine-3'-phosphate
  modified_base 5: mod_base = OTHER; note = 2'-O-methylguanosine-3'-phosphate
  modified_base 6: mod_base = OTHER; note = 2'-O-methylcytidine-3'-phosphate
  modified_base 7: mod_base = OTHER; note = 2'-deoxy-2'-fluorouridine-3'-phosphate
  modified_base 8: mod_base = OTHER; note = 2'-O-methyluridine-3'-phosphate
  modified_base 9: mod_base = OTHER; note = 2'-deoxy-2'-fluorouridine-3'-phosphate
  modified_base 10: mod_base = OTHER; note = 2'-deoxy-2'-fluoroguanosine-3'-phosphate
  modified_base 11: mod_base = OTHER; note = 2'-deoxy-2'-fluoroadenosine-3'-phosphate
  modified_base 12: mod_base = OTHER; note = 2'-O-methylguanosine-3'-phosphate
  modified_base 13: mod_base = OTHER; note = 2'-O-methylcytidine-3'-phosphate
  modified_base 14: mod_base = OTHER; note = 2'-O-methylcytidine-3'-phosphate
  modified_base 15: mod_base = OTHER; note = 2'-O-methyluridine-3'-phosphate
  modified_base 16: mod_base = OTHER; note = 2'-O-methylcytidine-3'-phosphate
  modified_base 17: mod_base = OTHER; note = 2'-O-methyladenosine-3'-phosphate
  modified_base 18: mod_base = OTHER; note = 2'-O-methylguanosine-3'-phosphate
  modified_base 19: mod_base = OTHER; note = 2'-O-methylcytidine-3'-phosphate
  modified_base 20: mod_base = OTHER; note = 2'-O-methyluridine-3'-phosphate
  modified_base 21: mod_base = OTHER; note = 2'-O-methyladenosine-3'-phosphate ((2S,4R)-1-[29-[[2-(acetylamino)-2-deoxy-beta-D-galactopyra nosyl]oxy]-14,14-bis[[3-[[3-[[5-[[2-(acetylamino)-2-deoxy-b eta-D-galactopyranosyl]oxy]-1-oxopentyl]amino]propyl]amino] -3-oxopropoxy]methyl]-1,12,19,25-tetraoxo-16-oxa-13,20,24-t riazanonacos-1-yl]-4-hydroxy-2-pyrrolidinyl)methyl ester
aaatgctttgagcctcagcta

SEQ ID NO: 2169 - RNA, 21 nt, synthetic construct
  source 1..21: mol_type = other RNA
  modified_base 1: mod_base = OTHER; note = 2'-O-methyladenosine-3'-phosphorothioate
  modified_base 2: mod_base = OTHER; note = 2'-O-methyladenosine-3'-phosphorothioate
  modified_base 3: mod_base = OTHER; note = 2'-O-methyladenosine-3'-phosphate
  modified_base 4: mod_base = OTHER; note = 2'-O-methyluridine-3'-phosphate
  modified_base 5: mod_base = OTHER; note = 2'-O-methylguanosine-3'-phosphate
  modified_base 6: mod_base = OTHER; note = 2'-O-methylcytidine-3'-phosphate
  modified_base 7: mod_base = OTHER; note = 2'-deoxy-2'-fluorouridine-3'-phosphate
  modified_base 8: mod_base = OTHER; note = 2'-O-methyluridine-3'-phosphate
  modified_base 9: mod_base = OTHER; note = 2'-deoxy-2'-fluorouridine-3'-phosphate
  modified_base 10: mod_base = OTHER; note = 2'-deoxy-2'-fluoroguanosine-3'-phosphate
  modified_base 11: mod_base = OTHER; note = 2'-deoxy-2'-fluoroadenosine-3'-phosphate
  modified_base 12: mod_base = OTHER; note = 2'-O-methylguanosine-3'-phosphate
  modified_base 13: mod_base = OTHER; note = 2'-O-methylcytidine-3'-phosphate
  modified_base 14: mod_base = OTHER; note = 2'-O-methylcytidine-3'-phosphate
  modified_base 15: mod_base = OTHER; note = 2'-O-methyluridine-3'-phosphate
  modified_base 16: mod_base = OTHER; note = 2'-O-methylcytidine-3'-phosphate
  modified_base 17: mod_base = OTHER; note = 2'-O-methyladenosine-3'-phosphate
  modified_base 18: mod_base = OTHER; note = 2'-O-methylguanosine-3'-phosphate
  modified_base 19: mod_base = OTHER; note = 2'-O-methylcytidine-3'-phosphate
  modified_base 20: mod_base = OTHER; note = 2'-O-methyluridine-3'-phosphate
  modified_base 21: mod_base = OTHER; note = 2'-O-methyladenosine-3'-phosphate ((2S,4R)-1-[29-[[2-(acetylamino)-2-deoxy-beta-D-galactopyra nosyl]oxy]-14,14-bis[[3-[[3-[[5-[[2-(acetylamino)-2-deoxy-b eta-D-galactopyranosyl]oxy]-1-oxopentyl]amino]propyl]amino] -3-oxopropoxy]methyl]-1,12,19,25-tetraoxo-16-oxa-13,20,24-t riazanonacos-1-yl]-4-hydroxy-2-pyrrolidinyl)methyl ester
aaatgctttgagcctcagcta

SEQ ID NO: 2170 - RNA, 21 nt, synthetic construct
  source 1..21: mol_type = other RNA
  modified_base 1: mod_base = OTHER; note = 2'-O-methyladenosine-3'-phosphorothioate
  modified_base 2: mod_base = OTHER; note = 2'-O-methyluridine-3'-phosphorothioate
  modified_base 3: mod_base = OTHER; note = 2'-O-methylguanosine-3'-phosphate
  modified_base 4: mod_base = OTHER; note = 2'-O-methylcytidine-3'-phosphate
  modified_base 5: mod_base = OTHER; note = 2'-O-methyluridine-3'-phosphate
  modified_base 6: mod_base = OTHER; note = 2'-O-methyluridine-3'-phosphate
  modified_base 7: mod_base = OTHER; note = 2'-deoxy-2'-fluorouridine-3'-phosphate
  modified_base 8: mod_base = OTHER; note = 2'-O-methylguanosine-3'-phosphate
  modified_base 9: mod_base = OTHER; note = 2'-deoxy-2'-fluoroadenosine-3'-phosphate
  modified_base 10: mod_base = OTHER; note = 2'-deoxy-2'-fluoroguanosine-3'-phosphate
  modified_base 11: mod_base = OTHER; note = 2'-deoxy-2'-fluorocytidine-3'-phosphate
  modified_base 12: mod_base = OTHER; note = 2'-O-methylcytidine-3'-phosphate
  modified_base 13: mod_base = OTHER; note = 2'-O-methyluridine-3'-phosphate
  modified_base 14: mod_base = OTHER; note = 2'-O-methylcytidine-3'-phosphate
  modified_base 15: mod_base = OTHER; note = 2'-O-methyladenosine-3'-phosphate
  modified_base 16: mod_base = OTHER; note = 2'-O-methylguanosine-3'-phosphate
  modified_base 17: mod_base = OTHER; note = 2'-O-methylcytidine-3'-phosphate
  modified_base 18: mod_base = OTHER; note = 2'-O-methyluridine-3'-phosphate
  modified_base 19: mod_base = OTHER; note = 2'-O-methyluridine-3'-phosphate
  modified_base 20: mod_base = OTHER; note = 2'-O-methylcytidine-3'-phosphate
  modified_base 21: mod_base = OTHER; note = 2'-O-methyladenosine-3'-phosphate ((2S,4R)-1-[29-[[2-(acetylamino)-2-deoxy-beta-D-galactopyra nosyl]oxy]-14,14-bis[[3-[[3-[[5-[[2-(acetylamino)-2-deoxy-b eta-D-galactopyranosyl]oxy]-1-oxopentyl]amino]propyl]amino] -3-oxopropoxy]methyl]-1,12,19,25-tetraoxo-16-oxa-13,20,24-t riazanonacos-1-yl]-4-hydroxy-2-pyrrolidinyl)methyl ester
atgctttgagcctcagcttca

SEQ ID NO: 2171 - RNA, 21 nt, synthetic construct
  source 1..21: mol_type = other RNA
  modified_base 1: mod_base = OTHER; note = 2'-O-methyladenosine-3'-phosphorothioate
  modified_base 2: mod_base = OTHER; note = 2'-O-methyluridine-3'-phosphorothioate
  modified_base 3: mod_base = OTHER; note = 2'-O-methylguanosine-3'-phosphate
  modified_base 4: mod_base = OTHER; note = 2'-O-methylcytidine-3'-phosphate
  modified_base 5: mod_base = OTHER; note = 2'-O-methyluridine-3'-phosphate
  modified_base 6: mod_base = OTHER; note = 2'-O-methyluridine-3'-phosphate
  modified_base 7: mod_base = OTHER; note = 2'-deoxy-2'-fluorouridine-3'-phosphate
  modified_base 8: mod_base = OTHER; note = 2'-O-methylguanosine-3'-phosphate
  modified_base 9: mod_base = OTHER; note = 2'-deoxy-2'-fluoroadenosine-3'-phosphate
  modified_base 10: mod_base = OTHER; note = 2'-deoxy-2'-fluoroguanosine-3'-phosphate
  modified_base 11: mod_base = OTHER; note = 2'-deoxy-2'-fluorocytidine-3'-phosphate
  modified_base 12: mod_base = OTHER; note = 2'-O-methylcytidine-3'-phosphate
  modified_base 13: mod_base = OTHER; note = 2'-O-methyluridine-3'-phosphate
  modified_base 14: mod_base = OTHER; note = 2'-O-methylcytidine-3'-phosphate
  modified_base 15: mod_base = OTHER; note = 2'-O-methyladenosine-3'-phosphate
  modified_base 16: mod_base = OTHER; note = 2'-O-methylguanosine-3'-phosphate
  modified_base 17: mod_base = OTHER; note = 2'-O-methylcytidine-3'-phosphate
  modified_base 18: mod_base = OTHER; note = 2'-O-methyluridine-3'-phosphate
  modified_base 19: mod_base = OTHER; note = 2'-O-methyluridine-3'-phosphate
  modified_base 20: mod_base = OTHER; note = 2'-O-methylcytidine-3'-phosphate
  modified_base 21: mod_base = OTHER; note = 2'-O-methyladenosine-3'-phosphate ((2S,4R)-1-[29-[[2-(acetylamino)-2-deoxy-beta-D-galactopyra nosyl]oxy]-14,14-bis[[3-[[3-[[5-[[2-(acetylamino)-2-deoxy-b eta-D-galactopyranosyl]oxy]-1-oxopentyl]amino]propyl]amino] -3-oxopropoxy]methyl]-1,12,19,25-tetraoxo-16-oxa-13,20,24-t riazanonacos-1-yl]-4-hydroxy-2-pyrrolidinyl)methyl ester
atgctttgagcctcagcttca

SEQ ID NO: 2172 - RNA, 21 nt, synthetic construct
  source 1..21: mol_type = other RNA
  modified_base 1: mod_base = OTHER; note = 2'-O-methyluridine-3'-phosphorothioate
  modified_base 2: mod_base = OTHER; note = 2'-O-methylguanosine-3'-phosphorothioate
  modified_base 3: mod_base = OTHER; note = 2'-O-methylcytidine-3'-phosphate
  modified_base 4: mod_base = OTHER; note = 2'-O-methyluridine-3'-phosphate
  modified_base 5: mod_base = OTHER; note = 2'-O-methyluridine-3'-phosphate
  modified_base 6: mod_base = OTHER; note = 2'-O-methyluridine-3'-phosphate
  modified_base 7: mod_base = OTHER; note = 2'-deoxy-2'-fluoroguanosine-3'-phosphate
  modified_base 8: mod_base = OTHER; note = 2'-O-methyladenosine-3'-phosphate
  modified_base 9: mod_base = OTHER; note = 2'-deoxy-2'-fluoroguanosine-3'-phosphate
  modified_base 10: mod_base = OTHER; note = 2'-deoxy-2'-fluorocytidine-3'-phosphate
  modified_base 11: mod_base = OTHER; note = 2'-deoxy-2'-fluorocytidine-3'-phosphate
  modified_base 12: mod_base = OTHER; note = 2'-O-methyluridine-3'-phosphate
  modified_base 13: mod_base = OTHER; note = 2'-O-methylcytidine-3'-phosphate
  modified_base 14: mod_base = OTHER; note = 2'-O-methyladenosine-3'-phosphate
  modified_base 15: mod_base = OTHER; note = 2'-O-methylguanosine-3'-phosphate
  modified_base 16: mod_base = OTHER; note = 2'-O-methylcytidine-3'-phosphate
  modified_base 17: mod_base = OTHER; note = 2'-O-methyluridine-3'-phosphate
  modified_base 18: mod_base = OTHER; note = 2'-O-methyluridine-3'-phosphate
  modified_base 19: mod_base = OTHER; note = 2'-O-methylcytidine-3'-phosphate
  modified_base 20: mod_base = OTHER; note = 2'-O-methyluridine-3'-phosphate
  modified_base 21: mod_base = OTHER; note = 2'-O-methyladenosine-3'-phosphate ((2S,4R)-1-[29-[[2-(acetylamino)-2-deoxy-beta-D-galactopyra nosyl]oxy]-14,14-bis[[3-[[3-[[5-[[2-(acetylamino)-2-deoxy-b eta-D-galactopyranosyl]oxy]-1-oxopentyl]amino]propyl]amino] -3-oxopropoxy]methyl]-1,12,19,25-tetraoxo-16-oxa-13,20,24-t riazanonacos-1-yl]-4-hydroxy-2-pyrrolidinyl)methyl ester
tgctttgagcctcagcttcta

SEQ ID NO: 2173 - RNA, 21 nt, synthetic construct
  source 1..21: mol_type = other RNA
  modified_base 1: mod_base = OTHER; note = 2'-O-methyluridine-3'-phosphorothioate
  modified_base 2: mod_base = OTHER; note = 2'-O-methylguanosine-3'-phosphorothioate
  modified_base 3: mod_base = OTHER; note = 2'-O-methylcytidine-3'-phosphate
  modified_base 4: mod_base = OTHER; note = 2'-O-methyluridine-3'-phosphate
  modified_base 5: mod_base = OTHER; note = 2'-O-methyluridine-3'-phosphate
  modified_base 6: mod_base = OTHER; note = 2'-O-methyluridine-3'-phosphate
  modified_base 7: mod_base = OTHER; note = 2'-deoxy-2'-fluoroguanosine-3'-phosphate
  modified_base 8: mod_base = OTHER; note = 2'-O-methyladenosine-3'-phosphate
  modified_base 9: mod_base = OTHER; note = 2'-deoxy-2'-fluoroguanosine-3'-phosphate
  modified_base 10: mod_base = OTHER; note = 2'-deoxy-2'-fluorocytidine-3'-phosphate
  modified_base 11: mod_base = OTHER; note = 2'-deoxy-2'-fluorocytidine-3'-phosphate
  modified_base 12: mod_base = OTHER; note = 2'-O-methyluridine-3'-phosphate
  modified_base 13: mod_base = OTHER; note = 2'-O-methylcytidine-3'-phosphate
  modified_base 14: mod_base = OTHER; note = 2'-O-methyladenosine-3'-phosphate
  modified_base 15: mod_base = OTHER; note = 2'-O-methylguanosine-3'-phosphate
  modified_base 16: mod_base = OTHER; note = 2'-O-methylcytidine-3'-phosphate
  modified_base 17: mod_base = OTHER; note = 2'-O-methyluridine-3'-phosphate
  modified_base 18: mod_base = OTHER; note = 2'-O-methyluridine-3'-phosphate
  modified_base 19: mod_base = OTHER; note = 2'-O-methylcytidine-3'-phosphate
  modified_base 20: mod_base = OTHER; note = 2'-O-methyluridine-3'-phosphate
  modified_base 21: mod_base = OTHER; note = 2'-O-methyladenosine-3'-phosphate ((2S,4R)-1-[29-[[2-(acetylamino)-2-deoxy-beta-D-galactopyra nosyl]oxy]-14,14-bis[[3-[[3-[[5-[[2-(acetylamino)-2-deoxy-b eta-D-galactopyranosyl]oxy]-1-oxopentyl]amino]propyl]amino] -3-oxopropoxy]methyl]-1,12,19,25-tetraoxo-16-oxa-13,20,24-t riazanonacos-1-yl]-4-hydroxy-2-pyrrolidinyl)methyl ester
tgctttgagcctcagcttcta

SEQ ID NO: 2174 - RNA, 21 nt, synthetic construct
  source 1..21: mol_type = other RNA
  modified_base 1: mod_base = OTHER; note = 2'-O-methylguanosine-3'-phosphorothioate
  modified_base 2: mod_base = OTHER; note = 2'-O-methylcytidine-3'-phosphorothioate
  modified_base 3: mod_base = OTHER; note = 2'-O-methyluridine-3'-phosphate
  modified_base 4: mod_base = OTHER; note = 2'-O-methyluridine-3'-phosphate
  modified_base 5: mod_base = OTHER; note = 2'-O-methyluridine-3'-phosphate
  modified_base 6: mod_base = OTHER; note = 2'-O-methylguanosine-3'-phosphate
  modified_base 7: mod_base = OTHER; note = 2'-deoxy-2'-fluoroadenosine-3'-phosphate
  modified_base 8: mod_base = OTHER; note = 2'-O-methylguanosine-3'-phosphate
  modified_base 9: mod_base = OTHER; note = 2'-deoxy-2'-fluorocytidine-3'-phosphate
  modified_base 10: mod_base = OTHER; note = 2'-deoxy-2'-fluorocytidine-3'-phosphate
  modified_base 11: mod_base = OTHER; note = 2'-deoxy-2'-fluorouridine-3'-phosphate
  modified_base 12: mod_base = OTHER; note = 2'-O-methylcytidine-3'-phosphate
  modified_base 13: mod_base = OTHER; note = 2'-O-methyladenosine-3'-phosphate
  modified_base 14: mod_base = OTHER; note = 2'-O-methylguanosine-3'-phosphate
  modified_base 15: mod_base = OTHER; note = 2'-O-methylcytidine-3'-phosphate
  modified_base 16: mod_base = OTHER; note = 2'-O-methyluridine-3'-phosphate
  modified_base 17: mod_base = OTHER; note = 2'-O-methyluridine-3'-phosphate
  modified_base 18: mod_base = OTHER; note = 2'-O-methylcytidine-3'-phosphate
  modified_base 19: mod_base = OTHER; note = 2'-O-methyluridine-3'-phosphate
  modified_base 20: mod_base = OTHER; note = 2'-O-methylcytidine-3'-phosphate
  modified_base 21: mod_base = OTHER; note = 2'-O-methyladenosine-3'-phosphate ((2S,4R)-1-[29-[[2-(acetylamino)-2-deoxy-beta-D-galactopyra nosyl]oxy]-14,14-bis[[3-[[3-[[5-[[2-(acetylamino)-2-deoxy-b eta-D-galactopyranosyl]oxy]-1-oxopentyl]amino]propyl]amino] -3-oxopropoxy]methyl]-1,12,19,25-tetraoxo-16-oxa-13,20,24-t riazanonacos-1-yl]-4-hydroxy-2-pyrrolidinyl)methyl ester
gctttgagcctcagcttctca

SEQ ID NO: 2175 - RNA, 21 nt, synthetic construct
  source 1..21: mol_type = other RNA
  modified_base 1: mod_base = OTHER; note = 2'-O-methylguanosine-3'-phosphorothioate
  modified_base 2: mod_base = OTHER; note = 2'-O-methylcytidine-3'-phosphorothioate
  modified_base 3: mod_base = OTHER; note = 2'-O-methyluridine-3'-phosphate
  modified_base 4: mod_base = OTHER; note = 2'-O-methyluridine-3'-phosphate
  modified_base 5: mod_base = OTHER; note = 2'-O-methyluridine-3'-phosphate
  modified_base 6: mod_base = OTHER; note = 2'-O-methylguanosine-3'-phosphate
  modified_base 7: mod_base = OTHER; note = 2'-deoxy-2'-fluoroadenosine-3'-phosphate
  modified_base 8: mod_base = OTHER; note = 2'-O-methylguanosine-3'-phosphate
  modified_base 9: mod_base = OTHER; note = 2'-deoxy-2'-fluorocytidine-3'-phosphate
  modified_base 10: mod_base = OTHER; note = 2'-deoxy-2'-fluorocytidine-3'-phosphate
  modified_base 11: mod_base = OTHER; note = 2'-deoxy-2'-fluorouridine-3'-phosphate
  modified_base 12: mod_base = OTHER; note = 2'-O-methylcytidine-3'-phosphate
  modified_base 13: mod_base = OTHER; note = 2'-O-methyladenosine-3'-phosphate
  modified_base 14: mod_base = OTHER; note = 2'-O-methylguanosine-3'-phosphate
  modified_base 15: mod_base = OTHER; note = 2'-O-methylcytidine-3'-phosphate
  modified_base 16: mod_base = OTHER; note = 2'-O-methyluridine-3'-phosphate
  modified_base 17: mod_base = OTHER; note = 2'-O-methyluridine-3'-phosphate
  modified_base 18: mod_base = OTHER; note = 2'-O-methylcytidine-3'-phosphate
  modified_base 19: mod_base = OTHER; note = 2'-O-methyluridine-3'-phosphate
  modified_base 20: mod_base = OTHER; note = 2'-O-methylcytidine-3'-phosphate
  modified_base 21: mod_base = OTHER; note = 2'-O-methyladenosine-3'-phosphate ((2S,4R)-1-[29-[[2-(acetylamino)-2-deoxy-beta-D-galactopyra nosyl]oxy]-14,14-bis[[3-[[3-[[5-[[2-(acetylamino)-2-deoxy-b eta-D-galactopyranosyl]oxy]-1-oxopentyl]amino]propyl]amino] -3-oxopropoxy]methyl]-1,12,19,25-tetraoxo-16-oxa-13,20,24-t riazanonacos-1-yl]-4-hydroxy-2-pyrrolidinyl)methyl ester
gctttgagcctcagcttctca

SEQ ID NO: 2176 - RNA, 21 nt, synthetic construct
  source 1..21: mol_type = other RNA
  modified_base 1: mod_base = OTHER; note = 2'-O-methyladenosine-3'-phosphorothioate
  modified_base 2: mod_base = OTHER; note = 2'-O-methylcytidine-3'-phosphorothioate
  modified_base 3: mod_base = OTHER; note = 2'-O-methyluridine-3'-phosphate
  modified_base 4: mod_base = OTHER; note = 2'-O-methylcytidine-3'-phosphate
  modified_base 5: mod_base = OTHER; note = 2'-O-methylcytidine-3'-phosphate
  modified_base 6: mod_base = OTHER; note = 2'-O-methyladenosine-3'-phosphate
  modified_base 7: mod_base = OTHER; note = 2'-deoxy-2'-fluorocytidine-3'-phosphate
  modified_base 8: mod_base = OTHER; note = 2'-O-methylcytidine-3'-phosphate
  modified_base 9: mod_base = OTHER; note = 2'-deoxy-2'-fluorouridine-3'-phosphate
  modified_base 10: mod_base = OTHER; note = 2'-deoxy-2'-fluorouridine-3'-phosphate
  modified_base 11: mod_base = OTHER; note = 2'-deoxy-2'-fluorocytidine-3'-phosphate
  modified_base 12: mod_base = OTHER; note = 2'-O-methylcytidine-3'-phosphate
  modified_base 13: mod_base = OTHER; note = 2'-O-methyluridine-3'-phosphate
  modified_base 14: mod_base = OTHER; note = 2'-O-methylguanosine-3'-phosphate
  modified_base 15: mod_base = OTHER; note = 2'-O-methylcytidine-3'-phosphate
  modified_base 16: mod_base = OTHER; note = 2'-O-methyladenosine-3'-phosphate
  modified_base 17: mod_base = OTHER; note = 2'-O-methylguanosine-3'-phosphate
  modified_base 18: mod_base = OTHER; note = 2'-O-methylguanosine-3'-phosphate
  modified_base 19: mod_base = OTHER; note = 2'-O-methyladenosine-3'-phosphate
  modified_base 20: mod_base = OTHER; note = 2'-O-methylguanosine-3'-phosphate
  modified_base 21: mod_base = OTHER; note = 2'-O-methyladenosine-3'-phosphate ((2S,4R)-1-[29-[[2-(acetylamino)-2-deoxy-beta-D-galactopyra nosyl]oxy]-14,14-bis[[3-[[3-[[5-[[2-(acetylamino)-2-deoxy-b eta-D-galactopyranosyl]oxy]-1-oxopentyl]amino]propyl]amino] -3-oxopropoxy]methyl]-1,12,19,25-tetraoxo-16-oxa-13,20,24-t riazanonacos-1-yl]-4-hydroxy-2-pyrrolidinyl)methyl ester
actccaccttcctgcaggaga

SEQ ID NO: 2177 - RNA, 21 nt, synthetic construct
  source 1..21: mol_type = other RNA
  modified_base 1: mod_base = OTHER; note = 2'-O-methyladenosine-3'-phosphorothioate
  modified_base 2: mod_base = OTHER; note = 2'-O-methylcytidine-3'-phosphorothioate
  modified_base 3: mod_base = OTHER; note = 2'-O-methyluridine-3'-phosphate
  modified_base 4: mod_base = OTHER; note = 2'-O-methylcytidine-3'-phosphate
  modified_base 5: mod_base = OTHER; note = 2'-O-methylcytidine-3'-phosphate
  modified_base 6: mod_base = OTHER; note = 2'-O-methyladenosine-3'-phosphate
  modified_base 7: mod_base = OTHER; note = 2'-deoxy-2'-fluorocytidine-3'-phosphate
  modified_base 8: mod_base = OTHER; note = 2'-O-methylcytidine-3'-phosphate
  modified_base 9: mod_base = OTHER; note = 2'-deoxy-2'-fluorouridine-3'-phosphate
  modified_base 10: mod_base = OTHER; note = 2'-deoxy-2'-fluorouridine-3'-phosphate
  modified_base 11: mod_base = OTHER; note = 2'-deoxy-2'-fluorocytidine-3'-phosphate
  modified_base 12: mod_base = OTHER; note = 2'-O-methylcytidine-3'-phosphate
  modified_base 13: mod_base = OTHER; note = 2'-O-methyluridine-3'-phosphate
  modified_base 14: mod_base = OTHER; note = 2'-O-methylguanosine-3'-phosphate
  modified_base 15: mod_base = OTHER; note = 2'-O-methylcytidine-3'-phosphate
  modified_base 16: mod_base = OTHER; note = 2'-O-methyladenosine-3'-phosphate
  modified_base 17: mod_base = OTHER; note = 2'-O-methylguanosine-3'-phosphate
  modified_base 18: mod_base = OTHER; note = 2'-O-methylguanosine-3'-phosphate
  modified_base 19: mod_base = OTHER; note = 2'-O-methyladenosine-3'-phosphate
  modified_base 20: mod_base = OTHER; note = 2'-O-methylguanosine-3'-phosphate
  modified_base 21: mod_base = OTHER; note = 2'-O-methyladenosine-3'-phosphate ((2S,4R)-1-[29-[[2-(acetylamino)-2-deoxy-beta-D-galactopyra nosyl]oxy]-14,14-bis[[3-[[3-[[5-[[2-(acetylamino)-2-deoxy-b eta-D-galactopyranosyl]oxy]-1-oxopentyl]amino]propyl]amino] -3-oxopropoxy]methyl]-1,12,19,25-tetraoxo-16-oxa-13,20,24-t riazanonacos-1-yl]-4-hydroxy-2-pyrrolidinyl)methyl ester
actccaccttcctgcaggaga

SEQ ID NO: 2178 - RNA, 21 nt, synthetic construct
  source 1..21: mol_type = other RNA
  modified_base 1: mod_base = OTHER; note = 2'-O-methylcytidine-3'-phosphorothioate
  modified_base 2: mod_base = OTHER; note = 2'-O-methyladenosine-3'-phosphorothioate
  modified_base 3: mod_base = OTHER; note = 2'-O-methylcytidine-3'-phosphate
  modified_base 4: mod_base = OTHER; note = 2'-O-methyladenosine-3'-phosphate
  modified_base 5: mod_base = OTHER; note = 2'-O-methylguanosine-3'-phosphate
  modified_base 6: mod_base = OTHER; note = 2'-O-methyladenosine-3'-phosphate
  modified_base 7: mod_base = OTHER; note = 2'-deoxy-2'-fluoroadenosine-3'-phosphate
  modified_base 8: mod_base = OTHER; note = 2'-O-methyladenosine-3'-phosphate
  modified_base 9: mod_base = OTHER; note = 2'-deoxy-2'-fluorocytidine-3'-phosphate
  modified_base 10: mod_base = OTHER; note = 2'-deoxy-2'-fluorouridine-3'-phosphate
  modified_base 11: mod_base = OTHER; note = 2'-deoxy-2'-fluorocytidine-3'-phosphate
  modified_base 12: mod_base = OTHER; note = 2'-O-methyladenosine-3'-phosphate
  modified_base 13: mod_base = OTHER; note = 2'-O-methyladenosine-3'-phosphate
  modified_base 14: mod_base = OTHER; note = 2'-O-methyluridine-3'-phosphate
  modified_base 15: mod_base = OTHER; note = 2'-O-methyladenosine-3'-phosphate
  modified_base 16: mod_base = OTHER; note = 2'-O-methyladenosine-3'-phosphate
  modified_base 17: mod_base = OTHER; note = 2'-O-methyladenosine-3'-phosphate
  modified_base 18: mod_base = OTHER; note = 2'-O-methylguanosine-3'-phosphate
  modified_base 19: mod_base = OTHER; note = 2'-O-methyluridine-3'-phosphate
  modified_base 20: mod_base = OTHER; note = 2'-O-methylguanosine-3'-phosphate
  modified_base 21: mod_base = OTHER; note = 2'-O-methyladenosine-3'-phosphate ((2S,4R)-1-[29-[[2-(acetylamino)-2-deoxy-beta-D-galactopyra nosyl]oxy]-14,14-bis[[3-[[3-[[5-[[2-(acetylamino)-2-deoxy-b eta-D-galactopyranosyl]oxy]-1-oxopentyl]amino]propyl]amino] -3-oxopropoxy]methyl]-1,12,19,25-tetraoxo-16-oxa-13,20,24-t riazanonacos-1-yl]-4-hydroxy-2-pyrrolidinyl)methyl ester
cacagaaactcaataaagtga

SEQ ID NO: 2179 - RNA, 21 nt, synthetic construct
  source 1..21: mol_type = other RNA
  modified_base 1: mod_base = OTHER; note = 2'-O-methylcytidine-3'-phosphorothioate
  modified_base 2: mod_base = OTHER; note = 2'-O-methyladenosine-3'-phosphorothioate
  modified_base 3: mod_base = OTHER; note = 2'-O-methylcytidine-3'-phosphate
  modified_base 4: mod_base = OTHER; note = 2'-O-methyladenosine-3'-phosphate
  modified_base 5: mod_base = OTHER; note = 2'-O-methylguanosine-3'-phosphate
  modified_base 6: mod_base = OTHER; note = 2'-O-methyladenosine-3'-phosphate
  modified_base 7: mod_base = OTHER; note = 2'-deoxy-2'-fluoroadenosine-3'-phosphate
  modified_base 8: mod_base = OTHER; note = 2'-O-methyladenosine-3'-phosphate
  modified_base 9: mod_base = OTHER; note = 2'-deoxy-2'-fluorocytidine-3'-phosphate
  modified_base 10: mod_base = OTHER; note = 2'-deoxy-2'-fluorouridine-3'-phosphate
  modified_base 11: mod_base = OTHER; note = 2'-deoxy-2'-fluorocytidine-3'-phosphate
  modified_base 12: mod_base = OTHER; note = 2'-O-methyladenosine-3'-phosphate
  modified_base 13: mod_base = OTHER; note = 2'-O-methyladenosine-3'-phosphate
  modified_base 14: mod_base = OTHER; note = 2'-O-methyluridine-3'-phosphate
  modified_base 15: mod_base = OTHER; note = 2'-O-methyladenosine-3'-phosphate
  modified_base 16: mod_base = OTHER; note = 2'-O-methyladenosine-3'-phosphate
  modified_base 17: mod_base = OTHER; note = 2'-O-methyladenosine-3'-phosphate
  modified_base 18: mod_base = OTHER; note = 2'-O-methylguanosine-3'-phosphate
  modified_base 19: mod_base = OTHER; note = 2'-O-methyluridine-3'-phosphate
  modified_base 20: mod_base = OTHER; note = 2'-O-methylguanosine-3'-phosphate
  modified_base 21: mod_base = OTHER; note = 2'-O-methyladenosine-3'-phosphate ((2S,4R)-1-[29-[[2-(acetylamino)-2-deoxy-beta-D-galactopyra nosyl]oxy]-14,14-bis[[3-[[3-[[5-[[2-(acetylamino)-2-deoxy-b eta-D-galactopyranosyl]oxy]-1-oxopentyl]amino]propyl]amino] -3-oxopropoxy]methyl]-1,12,19,25-tetraoxo-16-oxa-13,20,24-t riazanonacos-1-yl]-4-hydroxy-2-pyrrolidinyl)methyl ester
cacagaaactcaataaagtga

SEQ ID NO: 2180 - RNA, 21 nt, synthetic construct
  source 1..21: mol_type = other RNA
  modified_base 1: mod_base = OTHER; note = 2'-O-methyladenosine-3'-phosphorothioate
  modified_base 2: mod_base = OTHER; note = 2'-O-methylcytidine-3'-phosphorothioate
  modified_base 3: mod_base = OTHER; note = 2'-O-methyladenosine-3'-phosphate
  modified_base 4: mod_base = OTHER; note = 2'-O-methylguanosine-3'-phosphate
  modified_base 5: mod_base = OTHER; note = 2'-O-methyladenosine-3'-phosphate
  modified_base 6: mod_base = OTHER; note = 2'-O-methyladenosine-3'-phosphate
  modified_base 7: mod_base = OTHER; note = 2'-deoxy-2'-fluoroadenosine-3'-phosphate
  modified_base 8: mod_base = OTHER; note = 2'-O-methylcytidine-3'-phosphate
  modified_base 9: mod_base = OTHER; note = 2'-deoxy-2'-fluorouridine-3'-phosphate
  modified_base 10: mod_base = OTHER; note = 2'-deoxy-2'-fluorocytidine-3'-phosphate
  modified_base 11: mod_base = OTHER; note = 2'-deoxy-2'-fluoroadenosine-3'-phosphate
  modified_base 12: mod_base = OTHER; note = 2'-O-methyladenosine-3'-phosphate
  modified_base 13: mod_base = OTHER; note = 2'-O-methyluridine-3'-phosphate
  modified_base 14: mod_base = OTHER; note = 2'-O-methyladenosine-3'-phosphate
  modified_base 15: mod_base = OTHER; note = 2'-O-methyladenosine-3'-phosphate
  modified_base 16: mod_base = OTHER; note = 2'-O-methyladenosine-3'-phosphate
  modified_base 17: mod_base = OTHER; note = 2'-O-methylguanosine-3'-phosphate
  modified_base 18: mod_base = OTHER; note = 2'-O-methyluridine-3'-phosphate
  modified_base 19: mod_base = OTHER; note = 2'-O-methylguanosine-3'-phosphate
  modified_base 20: mod_base = OTHER; note = 2'-O-methylcytidine-3'-phosphate
  modified_base 21: mod_base = OTHER; note = 2'-O-methyladenosine-3'-phosphate ((2S,4R)-1-[29-[[2-(acetylamino)-2-deoxy-beta-D-galactopyra nosyl]oxy]-14,14-bis[[3-[[3-[[5-[[2-(acetylamino)-2-deoxy-b eta-D-galactopyranosyl]oxy]-1-oxopentyl]amino]propyl]amino] -3-oxopropoxy]methyl]-1,12,19,25-tetraoxo-16-oxa-13,20,24-t riazanonacos-1-yl]-4-hydroxy-2-pyrrolidinyl)methyl ester
acagaaactcaataaagtgca

SEQ ID NO: 2181 - RNA, 21 nt, synthetic construct
  source 1..21: mol_type = other RNA
  modified_base 1: mod_base = OTHER; note = 2'-O-methyladenosine-3'-phosphorothioate
  modified_base 2: mod_base = OTHER; note = 2'-O-methylcytidine-3'-phosphorothioate
  modified_base 3: mod_base = OTHER; note = 2'-O-methyladenosine-3'-phosphate
  modified_base 4: mod_base = OTHER; note = 2'-O-methylguanosine-3'-phosphate
  modified_base 5: mod_base = OTHER; note = 2'-O-methyladenosine-3'-phosphate
  modified_base 6: mod_base = OTHER; note = 2'-O-methyladenosine-3'-phosphate
  modified_base 7: mod_base = OTHER; note = 2'-deoxy-2'-fluoroadenosine-3'-phosphate
  modified_base 8: mod_base = OTHER; note = 2'-O-methylcytidine-3'-phosphate
  modified_base 9: mod_base = OTHER; note = 2'-deoxy-2'-fluorouridine-3'-phosphate
  modified_base 10: mod_base = OTHER; note = 2'-deoxy-2'-fluorocytidine-3'-phosphate
  modified_base 11: mod_base = OTHER; note = 2'-deoxy-2'-fluoroadenosine-3'-phosphate
  modified_base 12: mod_base = OTHER; note = 2'-O-methyladenosine-3'-phosphate
  modified_base 13: mod_base = OTHER; note = 2'-O-methyluridine-3'-phosphate
  modified_base 14: mod_base = OTHER; note = 2'-O-methyladenosine-3'-phosphate
  modified_base 15: mod_base = OTHER; note = 2'-O-methyladenosine-3'-phosphate
  modified_base 16: mod_base = OTHER; note = 2'-O-methyladenosine-3'-phosphate
  modified_base 17: mod_base = OTHER; note = 2'-O-methylguanosine-3'-phosphate
  modified_base 18: mod_base = OTHER; note = 2'-O-methyluridine-3'-phosphate
  modified_base 19: mod_base = OTHER; note = 2'-O-methylguanosine-3'-phosphate
  modified_base 20: mod_base = OTHER; note = 2'-O-methylcytidine-3'-phosphate
  modified_base 21: mod_base = OTHER; note = 2'-O-methyladenosine-3'-phosphate ((2S,4R)-1-[29-[[2-(acetylamino)-2-deoxy-beta-D-galactopyra nosyl]oxy]-14,14-bis[[3-[[3-[[5-[[2-(acetylamino)-2-deoxy-b eta-D-galactopyranosyl]oxy]-1-oxopentyl]amino]propyl]amino] -3-oxopropoxy]methyl]-1,12,19,25-tetraoxo-16-oxa-13,20,24-t riazanonacos-1-yl]-4-hydroxy-2-pyrrolidinyl)methyl ester
acagaaactcaataaagtgca

SEQ ID NO: 2182 - RNA, 21 nt, synthetic construct
  source 1..21: mol_type = other RNA
  modified_base 1: mod_base = OTHER; note = 2'-O-methylcytidine-3'-phosphorothioate
  modified_base 2: mod_base = OTHER; note = 2'-O-methyladenosine-3'-phosphorothioate
  modified_base 3: mod_base = OTHER; note = 2'-O-methylguanosine-3'-phosphate
  modified_base 4: mod_base = OTHER; note = 2'-O-methyladenosine-3'-phosphate
  modified_base 5: mod_base = OTHER; note = 2'-O-methyladenosine-3'-phosphate
  modified_base 6: mod_base = OTHER; note = 2'-O-methyladenosine-3'-phosphate
  modified_base 7: mod_base = OTHER; note = 2'-deoxy-2'-fluorocytidine-3'-phosphate
  modified_base 8: mod_base = OTHER; note = 2'-O-methyluridine-3'-phosphate
  modified_base 9: mod_base = OTHER; note = 2'-deoxy-2'-fluorocytidine-3'-phosphate
  modified_base 10: mod_base = OTHER; note = 2'-deoxy-2'-fluoroadenosine-3'-phosphate
  modified_base 11: mod_base = OTHER; note = 2'-deoxy-2'-fluoroadenosine-3'-phosphate
  modified_base 12: mod_base = OTHER; note = 2'-O-methyluridine-3'-phosphate
  modified_base 13: mod_base = OTHER; note = 2'-O-methyladenosine-3'-phosphate
  modified_base 14: mod_base = OTHER; note = 2'-O-methyladenosine-3'-phosphate
  modified_base 15: mod_base = OTHER; note = 2'-O-methyladenosine-3'-phosphate
  modified_base 16: mod_base = OTHER; note = 2'-O-methylguanosine-3'-phosphate
  modified_base 17: mod_base = OTHER; note = 2'-O-methyluridine-3'-phosphate
  modified_base 18: mod_base = OTHER; note = 2'-O-methylguanosine-3'-phosphate
  modified_base 19: mod_base = OTHER; note = 2'-O-methylcytidine-3'-phosphate
  modified_base 20: mod_base = OTHER; note = 2'-O-methyluridine-3'-phosphate
  modified_base 21: mod_base = OTHER; note = 2'-O-methyladenosine-3'-phosphate ((2S,4R)-1-[29-[[2-(acetylamino)-2-deoxy-beta-D-galactopyra nosyl]oxy]-14,14-bis[[3-[[3-[[5-[[2-(acetylamino)-2-deoxy-b eta-D-galactopyranosyl]oxy]-1-oxopentyl]amino]propyl]amino] -3-oxopropoxy]methyl]-1,12,19,25-tetraoxo-16-oxa-13,20,24-t riazanonacos-1-yl]-4-hydroxy-2-pyrrolidinyl)methyl ester
cagaaactcaataaagtgcta

SEQ ID NO: 2183 - RNA, 21 nt, synthetic construct
  source 1..21: mol_type = other RNA
  modified_base 1: mod_base = OTHER; note = 2'-O-methylcytidine-3'-phosphorothioate
  modified_base 2: mod_base = OTHER; note = 2'-O-methyladenosine-3'-phosphorothioate
  modified_base 3: mod_base = OTHER; note = 2'-O-methylguanosine-3'-phosphate
  modified_base 4: mod_base = OTHER; note = 2'-O-methyladenosine-3'-phosphate
  modified_base 5: mod_base = OTHER; note = 2'-O-methyladenosine-3'-phosphate
  modified_base 6: mod_base = OTHER; note = 2'-O-methyladenosine-3'-phosphate
  modified_base 7: mod_base = OTHER; note = 2'-deoxy-2'-fluorocytidine-3'-phosphate
  modified_base 8: mod_base = OTHER; note = 2'-O-methyluridine-3'-phosphate
  modified_base 9: mod_base = OTHER; note = 2'-deoxy-2'-fluorocytidine-3'-phosphate
  modified_base 10: mod_base = OTHER; note = 2'-deoxy-2'-fluoroadenosine-3'-phosphate
  modified_base 11: mod_base = OTHER; note = 2'-deoxy-2'-fluoroadenosine-3'-phosphate
  modified_base 12: mod_base = OTHER; note = 2'-O-methyluridine-3'-phosphate
  modified_base 13: mod_base = OTHER; note = 2'-O-methyladenosine-3'-phosphate
  modified_base 14: mod_base = OTHER; note = 2'-O-methyladenosine-3'-phosphate
  modified_base 15: mod_base = OTHER; note = 2'-O-methyladenosine-3'-phosphate
  modified_base 16: mod_base = OTHER; note = 2'-O-methylguanosine-3'-phosphate
  modified_base 17: mod_base = OTHER; note = 2'-O-methyluridine-3'-phosphate
  modified_base 18: mod_base = OTHER; note = 2'-O-methylguanosine-3'-phosphate
  modified_base 19: mod_base = OTHER; note = 2'-O-methylcytidine-3'-phosphate
  modified_base 20: mod_base = OTHER; note = 2'-O-methyluridine-3'-phosphate
  modified_base 21: mod_base = OTHER; note = 2'-O-methyladenosine-3'-phosphate ((2S,4R)-1-[29-[[2-(acetylamino)-2-deoxy-beta-D-galactopyra nosyl]oxy]-14,14-bis[[3-[[3-[[5-[[2-(acetylamino)-2-deoxy-b eta-D-galactopyranosyl]oxy]-1-oxopentyl]amino]propyl]amino] -3-oxopropoxy]methyl]-1,12,19,25-tetraoxo-16-oxa-13,20,24-t riazanonacos-1-yl]-4-hydroxy-2-pyrrolidinyl)methyl ester
cagaaactcaataaagtgcta

SEQ ID NO: 2184 - RNA, 21 nt, synthetic construct
  source 1..21: mol_type = other RNA
  modified_base 1: mod_base = OTHER; note = 2'-O-methyladenosine-3'-phosphorothioate
  modified_base 2: mod_base = OTHER; note = 2'-O-methylguanosine-3'-phosphorothioate
  modified_base 3: mod_base = OTHER; note = 2'-O-methyladenosine-3'-phosphate
  modified_base 4: mod_base = OTHER; note = 2'-O-methyladenosine-3'-phosphate
  modified_base 5: mod_base = OTHER; note = 2'-O-methyladenosine-3'-phosphate
  modified_base 6: mod_base = OTHER; note = 2'-O-methylcytidine-3'-phosphate
  modified_base 7: mod_base = OTHER; note = 2'-deoxy-2'-fluorouridine-3'-phosphate
  modified_base 8: mod_base = OTHER; note = 2'-O-methylcytidine-3'-phosphate
  modified_base 9: mod_base = OTHER; note = 2'-deoxy-2'-fluoroadenosine-3'-phosphate
  modified_base 10: mod_base = OTHER; note = 2'-deoxy-2'-fluoroadenosine-3'-phosphate
  modified_base 11: mod_base = OTHER; note = 2'-deoxy-2'-fluorouridine-3'-phosphate
  modified_base 12: mod_base = OTHER; note = 2'-O-methyladenosine-3'-phosphate
  modified_base 13: mod_base = OTHER; note = 2'-O-methyladenosine-3'-phosphate
  modified_base 14: mod_base = OTHER; note = 2'-O-methyladenosine-3'-phosphate
  modified_base 15: mod_base = OTHER; note = 2'-O-methylguanosine-3'-phosphate
  modified_base 16: mod_base = OTHER; note = 2'-O-methyluridine-3'-phosphate
  modified_base 17: mod_base = OTHER; note = 2'-O-methylguanosine-3'-phosphate
  modified_base 18: mod_base = OTHER; note = 2'-O-methylcytidine-3'-phosphate
  modified_base 19: mod_base = OTHER; note = 2'-O-methyluridine-3'-phosphate
  modified_base 20: mod_base = OTHER; note = 2'-O-methyluridine-3'-phosphate
  modified_base 21: mod_base = OTHER; note = 2'-O-methyladenosine-3'-phosphate ((2S,4R)-1-[29-[[2-(acetylamino)-2-deoxy-beta-D-galactopyra nosyl]oxy]-14,14-bis[[3-[[3-[[5-[[2-(acetylamino)-2-deoxy-b eta-D-galactopyranosyl]oxy]-1-oxopentyl]amino]propyl]amino] -3-oxopropoxy]methyl]-1,12,19,25-tetraoxo-16-oxa-13,20,24-t riazanonacos-1-yl]-4-hydroxy-2-pyrrolidinyl)methyl ester
agaaactcaataaagtgctta

SEQ ID NO: 2185 - RNA, 21 nt, synthetic construct
  source 1..21: mol_type = other RNA
  modified_base 1: mod_base = OTHER; note = 2'-O-methyladenosine-3'-phosphorothioate
  modified_base 2: mod_base = OTHER; note = 2'-O-methylguanosine-3'-phosphorothioate
  modified_base 3: mod_base = OTHER; note = 2'-O-methyladenosine-3'-phosphate
  modified_base 4: mod_base = OTHER; note = 2'-O-methyladenosine-3'-phosphate
  modified_base 5: mod_base = OTHER; note = 2'-O-methyladenosine-3'-phosphate
  modified_base 6: mod_base = OTHER; note = 2'-O-methylcytidine-3'-phosphate
  modified_base 7: mod_base = OTHER; note = 2'-deoxy-2'-fluorouridine-3'-phosphate
  modified_base 8: mod_base = OTHER; note = 2'-O-methylcytidine-3'-phosphate
  modified_base 9: mod_base = OTHER; note = 2'-deoxy-2'-fluoroadenosine-3'-phosphate
  modified_base 10: mod_base = OTHER; note = 2'-deoxy-2'-fluoroadenosine-3'-phosphate
  modified_base 11: mod_base = OTHER; note = 2'-deoxy-2'-fluorouridine-3'-phosphate
  modified_base 12: mod_base = OTHER; note = 2'-O-methyladenosine-3'-phosphate
  modified_base 13: mod_base = OTHER; note = 2'-O-methyladenosine-3'-phosphate
  modified_base 14: mod_base = OTHER; note = 2'-O-methyladenosine-3'-phosphate
  modified_base 15: mod_base = OTHER; note = 2'-O-methylguanosine-3'-phosphate
  modified_base 16: mod_base = OTHER; note = 2'-O-methyluridine-3'-phosphate
  modified_base 17: mod_base = OTHER; note = 2'-O-methylguanosine-3'-phosphate
  modified_base 18: mod_base = OTHER; note = 2'-O-methylcytidine-3'-phosphate
  modified_base 19: mod_base = OTHER; note = 2'-O-methyluridine-3'-phosphate
  modified_base 20: mod_base = OTHER; note = 2'-O-methyluridine-3'-phosphate
  modified_base 21: mod_base = OTHER; note = 2'-O-methyladenosine-3'-phosphate ((2S,4R)-1-[29-[[2-(acetylamino)-2-deoxy-beta-D-galactopyra nosyl]oxy]-14,14-bis[[3-[[3-[[5-[[2-(acetylamino)-2-deoxy-b eta-D-galactopyranosyl]oxy]-1-oxopentyl]amino]propyl]amino] -3-oxopropoxy]methyl]-1,12,19,25-tetraoxo-16-oxa-13,20,24-t riazanonacos-1-yl]-4-hydroxy-2-pyrrolidinyl)methyl ester
agaaactcaataaagtgctta

SEQ ID NO: 2186 - RNA, 21 nt, synthetic construct
  source 1..21: mol_type = other RNA
  modified_base 1: mod_base = OTHER; note = 2'-O-methylguanosine-3'-phosphorothioate
  modified_base 2: mod_base = OTHER; note = 2'-O-methyladenosine-3'-phosphorothioate
  modified_base 3: mod_base = OTHER; note = 2'-O-methyladenosine-3'-phosphate
  modified_base 4: mod_base = OTHER; note = 2'-O-methyladenosine-3'-phosphate
  modified_base 5: mod_base = OTHER; note = 2'-O-methylcytidine-3'-phosphate
  modified_base 6: mod_base = OTHER; note = 2'-O-methyluridine-3'-phosphate
  modified_base 7: mod_base = OTHER; note = 2'-deoxy-2'-fluorocytidine-3'-phosphate
  modified_base 8: mod_base = OTHER; note = 2'-O-methyladenosine-3'-phosphate
  modified_base 9: mod_base = OTHER; note = 2'-deoxy-2'-fluoroadenosine-3'-phosphate
  modified_base 10: mod_base = OTHER; note = 2'-deoxy-2'-fluorouridine-3'-phosphate
  modified_base 11: mod_base = OTHER; note = 2'-deoxy-2'-fluoroadenosine-3'-phosphate
  modified_base 12: mod_base = OTHER; note = 2'-O-methyladenosine-3'-phosphate
  modified_base 13: mod_base = OTHER; note = 2'-O-methyladenosine-3'-phosphate
  modified_base 14: mod_base = OTHER; note = 2'-O-methylguanosine-3'-phosphate
  modified_base 15: mod_base = OTHER; note = 2'-O-methyluridine-3'-phosphate
  modified_base 16: mod_base = OTHER; note = 2'-O-methylguanosine-3'-phosphate
  modified_base 17: mod_base = OTHER; note = 2'-O-methylcytidine-3'-phosphate
  modified_base 18: mod_base = OTHER; note = 2'-O-methyluridine-3'-phosphate
  modified_base 19: mod_base = OTHER; note = 2'-O-methyluridine-3'-phosphate
  modified_base 20: mod_base = OTHER; note = 2'-O-methyluridine-3'-phosphate
  modified_base 21: mod_base = OTHER; note = 2'-O-methyladenosine-3'-phosphate ((2S,4R)-1-[29-[[2-(acetylamino)-2-deoxy-beta-D-galactopyra nosyl]oxy]-14,14-bis[[3-[[3-[[5-[[2-(acetylamino)-2-deoxy-b eta-D-galactopyranosyl]oxy]-1-oxopentyl]amino]propyl]amino] -3-oxopropoxy]methyl]-1,12,19,25-tetraoxo-16-oxa-13,20,24-t riazanonacos-1-yl]-4-hydroxy-2-pyrrolidinyl)methyl ester
gaaactcaataaagtgcttta

SEQ ID NO: 2187 - RNA, 21 nt, synthetic construct
  source 1..21: mol_type = other RNA
  modified_base 1: mod_base = OTHER; note = 2'-O-methylguanosine-3'-phosphorothioate
  modified_base 2: mod_base = OTHER; note = 2'-O-methyladenosine-3'-phosphorothioate
  modified_base 3: mod_base = OTHER; note = 2'-O-methyladenosine-3'-phosphate
  modified_base 4: mod_base = OTHER; note = 2'-O-methyladenosine-3'-phosphate
  modified_base 5: mod_base = OTHER; note = 2'-O-methylcytidine-3'-phosphate
  modified_base 6: mod_base = OTHER; note = 2'-O-methyluridine-3'-phosphate
  modified_base 7: mod_base = OTHER; note = 2'-deoxy-2'-fluorocytidine-3'-phosphate
  modified_base 8: mod_base = OTHER; note = 2'-O-methyladenosine-3'-phosphate
  modified_base 9: mod_base = OTHER; note = 2'-deoxy-2'-fluoroadenosine-3'-phosphate
  modified_base 10: mod_base = OTHER; note = 2'-deoxy-2'-fluorouridine-3'-phosphate
  modified_base 11: mod_base = OTHER; note = 2'-deoxy-2'-fluoroadenosine-3'-phosphate
  modified_base 12: mod_base = OTHER; note = 2'-O-methyladenosine-3'-phosphate
  modified_base 13: mod_base = OTHER; note = 2'-O-methyladenosine-3'-phosphate
  modified_base 14: mod_base = OTHER; note = 2'-O-methylguanosine-3'-phosphate
  modified_base 15: mod_base = OTHER; note = 2'-O-methyluridine-3'-phosphate
  modified_base 16: mod_base = OTHER; note = 2'-O-methylguanosine-3'-phosphate
  modified_base 17: mod_base = OTHER; note = 2'-O-methylcytidine-3'-phosphate
  modified_base 18: mod_base = OTHER; note = 2'-O-methyluridine-3'-phosphate
  modified_base 19: mod_base = OTHER; note = 2'-O-methyluridine-3'-phosphate
  modified_base 20: mod_base = OTHER; note = 2'-O-methyluridine-3'-phosphate
  modified_base 21: mod_base = OTHER; note = 2'-O-methyladenosine-3'-phosphate ((2S,4R)-1-[29-[[2-(acetylamino)-2-deoxy-beta-D-galactopyra nosyl]oxy]-14,14-bis[[3-[[3-[[5-[[2-(acetylamino)-2-deoxy-b eta-D-galactopyranosyl]oxy]-1-oxopentyl]amino]propyl]amino] -3-oxopropoxy]methyl]-1,12,19,25-tetraoxo-16-oxa-13,20,24-t riazanonacos-1-yl]-4-hydroxy-2-pyrrolidinyl)methyl ester
gaaactcaataaagtgcttta

SEQ ID NO: 2188 - RNA, 21 nt, synthetic construct
  source 1..21: mol_type = other RNA
  modified_base 1: mod_base = OTHER; note = 2'-O-methyladenosine-3'-phosphorothioate
  modified_base 2: mod_base = OTHER; note = 2'-O-methyladenosine-3'-phosphorothioate
  modified_base 3: mod_base = OTHER; note = 2'-O-methyladenosine-3'-phosphate
  modified_base 4: mod_base = OTHER; note = 2'-O-methylcytidine-3'-phosphate
  modified_base 5: mod_base = OTHER; note = 2'-O-methyluridine-3'-phosphate
  modified_base 6: mod_base = OTHER; note = 2'-O-methylcytidine-3'-phosphate
  modified_base 7: mod_base = OTHER; note = 2'-deoxy-2'-fluoroadenosine-3'-phosphate
  modified_base 8: mod_base = OTHER; note = 2'-O-methyladenosine-3'-phosphate
  modified_base 9: mod_base = OTHER; note = 2'-deoxy-2'-fluorouridine-3'-phosphate
  modified_base 10: mod_base = OTHER; note = 2'-deoxy-2'-fluoroadenosine-3'-phosphate
  modified_base 11: mod_base = OTHER; note = 2'-deoxy-2'-fluoroadenosine-3'-phosphate
  modified_base 12: mod_base = OTHER; note = 2'-O-methyladenosine-3'-phosphate
  modified_base 13: mod_base = OTHER; note = 2'-O-methylguanosine-3'-phosphate
  modified_base 14: mod_base = OTHER; note = 2'-O-methyluridine-3'-phosphate
  modified_base 15: mod_base = OTHER; note = 2'-O-methylguanosine-3'-phosphate
  modified_base 16: mod_base = OTHER; note = 2'-O-methylcytidine-3'-phosphate
  modified_base 17: mod_base = OTHER; note = 2'-O-methyluridine-3'-phosphate
  modified_base 18: mod_base = OTHER; note = 2'-O-methyluridine-3'-phosphate
  modified_base 19: mod_base = OTHER; note = 2'-O-methyluridine-3'-phosphate
  modified_base 20: mod_base = OTHER; note = 2'-O-methylguanosine-3'-phosphate
  modified_base 21: mod_base = OTHER; note = 2'-O-methyladenosine-3'-phosphate ((2S,4R)-1-[29-[[2-(acetylamino)-2-deoxy-beta-D-galactopyra nosyl]oxy]-14,14-bis[[3-[[3-[[5-[[2-(acetylamino)-2-deoxy-b eta-D-galactopyranosyl]oxy]-1-oxopentyl]amino]propyl]amino] -3-oxopropoxy]methyl]-1,12,19,25-tetraoxo-16-oxa-13,20,24-t riazanonacos-1-yl]-4-hydroxy-2-pyrrolidinyl)methyl ester
aaactcaataaagtgctttga

SEQ ID NO: 2189 - RNA, 21 nt, synthetic construct
  source 1..21: mol_type = other RNA
  modified_base 1: mod_base = OTHER; note = 2'-O-methyladenosine-3'-phosphorothioate
  modified_base 2: mod_base = OTHER; note = 2'-O-methyladenosine-3'-phosphorothioate
  modified_base 3: mod_base = OTHER; note = 2'-O-methyladenosine-3'-phosphate
  modified_base 4: mod_base = OTHER; note = 2'-O-methylcytidine-3'-phosphate
  modified_base 5: mod_base = OTHER; note = 2'-O-methyluridine-3'-phosphate
  modified_base 6: mod_base = OTHER; note = 2'-O-methylcytidine-3'-phosphate
  modified_base 7: mod_base = OTHER; note = 2'-deoxy-2'-fluoroadenosine-3'-phosphate
  modified_base 8: mod_base = OTHER; note = 2'-O-methyladenosine-3'-phosphate
  modified_base 9: mod_base = OTHER; note = 2'-deoxy-2'-fluorouridine-3'-phosphate
  modified_base 10: mod_base = OTHER; note = 2'-deoxy-2'-fluoroadenosine-3'-phosphate
  modified_base 11: mod_base = OTHER; note = 2'-deoxy-2'-fluoroadenosine-3'-phosphate
  modified_base 12: mod_base = OTHER; note = 2'-O-methyladenosine-3'-phosphate
  modified_base 13: mod_base = OTHER; note = 2'-O-methylguanosine-3'-phosphate
  modified_base 14: mod_base = OTHER; note = 2'-O-methyluridine-3'-phosphate
  modified_base 15: mod_base = OTHER; note = 2'-O-methylguanosine-3'-phosphate
  modified_base 16: mod_base = OTHER; note = 2'-O-methylcytidine-3'-phosphate
  modified_base 17: mod_base = OTHER; note = 2'-O-methyluridine-3'-phosphate
  modified_base 18: mod_base = OTHER; note = 2'-O-methyluridine-3'-phosphate
  modified_base 19: mod_base = OTHER; note = 2'-O-methyluridine-3'-phosphate
  modified_base 20: mod_base = OTHER; note = 2'-O-methylguanosine-3'-phosphate
  modified_base 21: mod_base = OTHER; note = 2'-O-methyladenosine-3'-phosphate ((2S,4R)-1-[29-[[2-(acetylamino)-2-deoxy-beta-D-galactopyra nosyl]oxy]-14,14-bis[[3-[[3-[[5-[[2-(acetylamino)-2-deoxy-b eta-D-galactopyranosyl]oxy]-1-oxopentyl]amino]propyl]amino] -3-oxopropoxy]methyl]-1,12,19,25-tetraoxo-16-oxa-13,20,24-t riazanonacos-1-yl]-4-hydroxy-2-pyrrolidinyl)methyl ester
aaactcaataaagtgctttga

SEQ ID NO: 2190 - RNA, 21 nt, synthetic construct
  source 1..21: mol_type = other RNA
  modified_base 1: mod_base = OTHER; note = 2'-O-methyladenosine-3'-phosphorothioate
  modified_base 2: mod_base = OTHER; note = 2'-O-methylcytidine-3'-phosphorothioate
  modified_base 3: mod_base = OTHER; note = 2'-O-methyluridine-3'-phosphate
  modified_base 4: mod_base = OTHER; note = 2'-O-methylcytidine-3'-phosphate
  modified_base 5: mod_base = OTHER; note = 2'-O-methyladenosine-3'-phosphate
  modified_base 6: mod_base = OTHER; note = 2'-O-methyladenosine-3'-phosphate
  modified_base 7: mod_base = OTHER; note = 2'-deoxy-2'-fluorouridine-3'-phosphate
  modified_base 8: mod_base = OTHER; note = 2'-O-methyladenosine-3'-phosphate
  modified_base 9: mod_base = OTHER; note = 2'-deoxy-2'-fluoroadenosine-3'-phosphate
  modified_base 10: mod_base = OTHER; note = 2'-deoxy-2'-fluoroadenosine-3'-phosphate
  modified_base 11: mod_base = OTHER; note = 2'-deoxy-2'-fluoroguanosine-3'-phosphate
  modified_base 12: mod_base = OTHER; note = 2'-O-methyluridine-3'-phosphate
  modified_base 13: mod_base = OTHER; note = 2'-O-methylguanosine-3'-phosphate
  modified_base 14: mod_base = OTHER; note = 2'-O-methylcytidine-3'-phosphate
  modified_base 15: mod_base = OTHER; note = 2'-O-methyluridine-3'-phosphate
  modified_base 16: mod_base = OTHER; note = 2'-O-methyluridine-3'-phosphate
  modified_base 17: mod_base = OTHER; note = 2'-O-methyluridine-3'-phosphate
  modified_base 18: mod_base = OTHER; note = 2'-O-methylguanosine-3'-phosphate
  modified_base 19: mod_base = OTHER; note = 2'-O-methyladenosine-3'-phosphate
  modified_base 20: mod_base = OTHER; note = 2'-O-methyladenosine-3'-phosphate
  modified_base 21: mod_base = OTHER; note = 2'-O-methyladenosine-3'-phosphate ((2S,4R)-1-[29-[[2-(acetylamino)-2-deoxy-beta-D-galactopyra nosyl]oxy]-14,14-bis[[3-[[3-[[5-[[2-(acetylamino)-2-deoxy-b eta-D-galactopyranosyl]oxy]-1-oxopentyl]amino]propyl]amino] -3-oxopropoxy]methyl]-1,12,19,25-tetraoxo-16-oxa-13,20,24-t riazanonacos-1-yl]-4-hydroxy-2-pyrrolidinyl)methyl ester
actcaataaagtgctttgaaa

SEQ ID NO: 2191 - RNA, 21 nt, synthetic construct
  source 1..21: mol_type = other RNA
  modified_base 1: mod_base = OTHER; note = 2'-O-methyladenosine-3'-phosphorothioate
  modified_base 2: mod_base = OTHER; note = 2'-O-methylcytidine-3'-phosphorothioate
  modified_base 3: mod_base = OTHER; note = 2'-O-methyluridine-3'-phosphate
  modified_base 4: mod_base = OTHER; note = 2'-O-methylcytidine-3'-phosphate
  modified_base 5: mod_base = OTHER; note = 2'-O-methyladenosine-3'-phosphate
  modified_base 6: mod_base = OTHER; note = 2'-O-methyladenosine-3'-phosphate
  modified_base 7: mod_base = OTHER; note = 2'-deoxy-2'-fluorouridine-3'-phosphate
  modified_base 8: mod_base = OTHER; note = 2'-O-methyladenosine-3'-phosphate
  modified_base 9: mod_base = OTHER; note = 2'-deoxy-2'-fluoroadenosine-3'-phosphate
  modified_base 10: mod_base = OTHER; note = 2'-deoxy-2'-fluoroadenosine-3'-phosphate
  modified_base 11: mod_base = OTHER; note = 2'-deoxy-2'-fluoroguanosine-3'-phosphate
  modified_base 12: mod_base = OTHER; note = 2'-O-methyluridine-3'-phosphate
  modified_base 13: mod_base = OTHER; note = 2'-O-methylguanosine-3'-phosphate
  modified_base 14: mod_base = OTHER; note = 2'-O-methylcytidine-3'-phosphate
  modified_base 15: mod_base = OTHER; note = 2'-O-methyluridine-3'-phosphate
  modified_base 16: mod_base = OTHER; note = 2'-O-methyluridine-3'-phosphate
  modified_base 17: mod_base = OTHER; note = 2'-O-methyluridine-3'-phosphate
  modified_base 18: mod_base = OTHER; note = 2'-O-methylguanosine-3'-phosphate
  modified_base 19: mod_base = OTHER; note = 2'-O-methyladenosine-3'-phosphate
  modified_base 20: mod_base = OTHER; note = 2'-O-methyladenosine-3'-phosphate
  modified_base 21: mod_base = OTHER; note = 2'-O-methyladenosine-3'-phosphate ((2S,4R)-1-[29-[[2-(acetylamino)-2-deoxy-beta-D-galactopyra nosyl]oxy]-14,14-bis[[3-[[3-[[5-[[2-(acetylamino)-2-deoxy-b eta-D-galactopyranosyl]oxy]-1-oxopentyl]amino]propyl]amino] -3-oxopropoxy]methyl]-1,12,19,25-tetraoxo-16-oxa-13,20,24-t riazanonacos-1-yl]-4-hydroxy-2-pyrrolidinyl)methyl ester
actcaataaagtgctttgaaa

SEQ ID NO: 2192 - RNA, 21 nt, synthetic construct
  source 1..21: mol_type = other RNA
  modified_base 1: mod_base = OTHER; note = 2'-O-methyluridine-3'-phosphorothioate
  modified_base 2: mod_base = OTHER; note = 2'-O-methylcytidine-3'-phosphorothioate
  modified_base 3: mod_base = OTHER; note = 2'-O-methyladenosine-3'-phosphate
  modified_base 4: mod_base = OTHER; note = 2'-O-methyladenosine-3'-phosphate
  modified_base 5: mod_base = OTHER; note = 2'-O-methyluridine-3'-phosphate
  modified_base 6: mod_base = OTHER; note = 2'-O-methyladenosine-3'-phosphate
  modified_base 7: mod_base = OTHER; note = 2'-deoxy-2'-fluoroadenosine-3'-phosphate
  modified_base 8: mod_base = OTHER; note = 2'-O-methyladenosine-3'-phosphate
  modified_base 9: mod_base = OTHER; note = 2'-deoxy-2'-fluoroguanosine-3'-phosphate
  modified_base 10: mod_base = OTHER; note = 2'-deoxy-2'-fluorouridine-3'-phosphate
  modified_base 11: mod_base = OTHER; note = 2'-deoxy-2'-fluoroguanosine-3'-phosphate
  modified_base 12: mod_base = OTHER; note = 2'-O-methylcytidine-3'-phosphate
  modified_base 13: mod_base = OTHER; note = 2'-O-methyluridine-3'-phosphate
  modified_base 14: mod_base = OTHER; note = 2'-O-methyluridine-3'-phosphate
  modified_base 15: mod_base = OTHER; note = 2'-O-methyluridine-3'-phosphate
  modified_base 16: mod_base = OTHER; note = 2'-O-methylguanosine-3'-phosphate
  modified_base 17: mod_base = OTHER; note = 2'-O-methyladenosine-3'-phosphate
  modified_base 18: mod_base = OTHER; note = 2'-O-methyladenosine-3'-phosphate
  modified_base 19: mod_base = OTHER; note = 2'-O-methyladenosine-3'-phosphate
  modified_base 20: mod_base = OTHER; note = 2'-O-methyladenosine-3'-phosphate
  modified_base 21: mod_base = OTHER; note = 2'-O-methyladenosine-3'-phosphate ((2S,4R)-1-[29-[[2-(acetylamino)-2-deoxy-beta-D-galactopyra nosyl]oxy]-14,14-bis[[3-[[3-[[5-[[2-(acetylamino)-2-deoxy-b eta-D-galactopyranosyl]oxy]-1-oxopentyl]amino]propyl]amino] -3-oxopropoxy]methyl]-1,12,19,25-tetraoxo-16-oxa-13,20,24-t riazanonacos-1-yl]-4-hydroxy-2-pyrrolidinyl)methyl ester
tcaataaagtgctttgaaaaa

SEQ ID NO: 2193 - RNA, 21 nt, synthetic construct
  source 1..21: mol_type = other RNA
  modified_base 1: mod_base = OTHER; note = 2'-O-methyluridine-3'-phosphorothioate
  modified_base 2: mod_base = OTHER; note = 2'-O-methylcytidine-3'-phosphorothioate
  modified_base 3: mod_base = OTHER; note = 2'-O-methyladenosine-3'-phosphate
  modified_base 4: mod_base = OTHER; note = 2'-O-methyladenosine-3'-phosphate
  modified_base 5: mod_base = OTHER; note = 2'-O-methyluridine-3'-phosphate
  modified_base 6: mod_base = OTHER; note = 2'-O-methyladenosine-3'-phosphate
  modified_base 7: mod_base = OTHER; note = 2'-deoxy-2'-fluoroadenosine-3'-phosphate
  modified_base 8: mod_base = OTHER; note = 2'-O-methyladenosine-3'-phosphate
  modified_base 9: mod_base = OTHER; note = 2'-deoxy-2'-fluoroguanosine-3'-phosphate
  modified_base 10: mod_base = OTHER; note = 2'-deoxy-2'-fluorouridine-3'-phosphate
  modified_base 11: mod_base = OTHER; note = 2'-deoxy-2'-fluoroguanosine-3'-phosphate
  modified_base 12: mod_base = OTHER; note = 2'-O-methylcytidine-3'-phosphate
  modified_base 13: mod_base = OTHER; note = 2'-O-methyluridine-3'-phosphate
  modified_base 14: mod_base = OTHER; note = 2'-O-methyluridine-3'-phosphate
  modified_base 15: mod_base = OTHER; note = 2'-O-methyluridine-3'-phosphate
  modified_base 16: mod_base = OTHER; note = 2'-O-methylguanosine-3'-phosphate
  modified_base 17: mod_base = OTHER; note = 2'-O-methyladenosine-3'-phosphate
  modified_base 18: mod_base = OTHER; note = 2'-O-methyladenosine-3'-phosphate
  modified_base 19: mod_base = OTHER; note = 2'-O-methyladenosine-3'-phosphate
  modified_base 20: mod_base = OTHER; note = 2'-O-methyladenosine-3'-phosphate
  modified_base 21: mod_base = OTHER; note = 2'-O-methyladenosine-3'-phosphate ((2S,4R)-1-[29-[[2-(acetylamino)-2-deoxy-beta-D-galactopyra nosyl]oxy]-14,14-bis[[3-[[3-[[5-[[2-(acetylamino)-2-deoxy-b eta-D-galactopyranosyl]oxy]-1-oxopentyl]amino]propyl]amino] -3-oxopropoxy]methyl]-1,12,19,25-tetraoxo-16-oxa-13,20,24-t riazanonacos-1-yl]-4-hydroxy-2-pyrrolidinyl)methyl ester
tcaataaagtgctttgaaaaa

SEQ ID NO: 2194 - RNA, 21 nt, synthetic construct
  source 1..21: mol_type = other RNA
  modified_base 1: mod_base = OTHER; note = 2'-O-methyladenosine-3'-phosphorothioate
  modified_base 2: mod_base = OTHER; note = 2'-O-methyladenosine-3'-phosphorothioate
  modified_base 3: mod_base = OTHER; note = 2'-O-methylcytidine-3'-phosphate
  modified_base 4: mod_base = OTHER; note = 2'-O-methyluridine-3'-phosphate
  modified_base 5: mod_base = OTHER; note = 2'-O-methylcytidine-3'-phosphate
  modified_base 6: mod_base = OTHER; note = 2'-O-methyladenosine-3'-phosphate
  modified_base 7: mod_base = OTHER; note = 2'-deoxy-2'-fluoroadenosine-3'-phosphate
  modified_base 8: mod_base = OTHER; note = 2'-O-methyluridine-3'-phosphate
  modified_base 9: mod_base = OTHER; note = 2'-deoxy-2'-fluoroadenosine-3'-phosphate
  modified_base 10: mod_base = OTHER; note = 2'-deoxy-2'-fluoroadenosine-3'-phosphate
  modified_base 11: mod_base = OTHER; note = 2'-deoxy-2'-fluoroadenosine-3'-phosphate
  modified_base 12: mod_base = OTHER; note = 2'-O-methylguanosine-3'-phosphate
  modified_base 13: mod_base = OTHER; note = 2'-O-methyluridine-3'-phosphate
  modified_base 14: mod_base = OTHER; note = 2'-O-methylguanosine-3'-phosphate
  modified_base 15: mod_base = OTHER; note = 2'-O-methylcytidine-3'-phosphate
  modified_base 16: mod_base = OTHER; note = 2'-O-methyluridine-3'-phosphate
  modified_base 17: mod_base = OTHER; note = 2'-O-methyluridine-3'-phosphate
  modified_base 18: mod_base = OTHER; note = 2'-O-methyluridine-3'-phosphate
  modified_base 19: mod_base = OTHER; note = 2'-O-methylguanosine-3'-phosphate
  modified_base 20: mod_base = OTHER; note = 2'-O-methyladenosine-3'-phosphate
  modified_base 21: mod_base = OTHER; note = 2'-O-methyladenosine-3'-phosphate ((2S,4R)-1-[29-[[2-(acetylamino)-2-deoxy-beta-D-galactopyra nosyl]oxy]-14,14-bis[[3-[[3-[[5-[[2-(acetylamino)-2-deoxy-b eta-D-galactopyranosyl]oxy]-1-oxopentyl]amino]propyl]amino] -3-oxopropoxy]methyl]-1,12,19,25-tetraoxo-16-oxa-13,20,24-t riazanonacos-1-yl]-4-hydroxy-2-pyrrolidinyl)methyl ester
aactcaataaagtgctttgaa

SEQ ID NO: 2195 - RNA, 23 nt, synthetic construct
  source 1..23: mol_type = other RNA
  modified_base 1: mod_base = OTHER; note = 2'-O-methyluridine-3'-phosphorothioate
  modified_base 2: mod_base = OTHER; note = 2'-deoxy-2'-fluorocytidine-3'-phosphorothioate
  modified_base 3: mod_base = OTHER; note = 2'-O-methyluridine-3'-phosphate
  modified_base 4: mod_base = OTHER; note = 2'-O-methyluridine-3'-phosphate
  modified_base 5: mod_base = OTHER; note = 2'-O-methyluridine-3'-phosphate
  modified_base 6: mod_base = OTHER; note = 2'-deoxy-2'-fluorocytidine-3'-phosphate
  modified_base 7: mod_base = OTHER; note = 2'-O-methyladenosine-3'-phosphate
  modified_base 8: mod_base = OTHER; note = 2'-deoxy-2'-fluorocytidine-3'-phosphate
  modified_base 9: mod_base = OTHER; note = 2'-deoxy-2'-fluorouridine-3'-phosphate
  modified_base 10: mod_base = OTHER; note = 2'-O-methyluridine-3'-phosphate
  modified_base 11: mod_base = OTHER; note = 2'-O-methyluridine-3'-phosphate
  modified_base 12: mod_base = OTHER; note = 2'-O-methylcytidine-3'-phosphate
  modified_base 13: mod_base = OTHER; note = 2'-O-methyluridine-3'-phosphate
  modified_base 14: mod_base = OTHER; note = 2'-deoxy-2'-fluorouridine-3'-phosphate
  modified_base 15: mod_base = OTHER; note = 2'-O-methylguanosine-3'-phosphate
  modified_base 16: mod_base = OTHER; note = 2'-deoxy-2'-fluoroguanosine-3'-phosphate
  modified_base 17: mod_base = OTHER; note = 2'-O-methylguanosine-3'-phosphate
  modified_base 18: mod_base = OTHER; note = 2'-O-methylcytidine-3'-phosphate
  modified_base 19: mod_base = OTHER; note = 2'-O-methyluridine-3'-phosphate
  modified_base 20: mod_base = OTHER; note = 2'-O-methylcytidine-3'-phosphate
  modified_base 21: mod_base = OTHER; note = 2'-O-methylcytidine-3'-phosphorothioate
  modified_base 22: mod_base = OTHER; note = 2'-O-methyladenosine-3'-phosphorothioate
  modified_base 23: mod_base = OTHER; note = 2'-O-methyladenosine
tctttcactttcttgggctccaa

SEQ ID NO: 2196 - RNA, 23 nt, synthetic construct
  source 1..23: mol_type = other RNA
  modified_base 1: mod_base = OTHER; note = 2'-O-methyluridine-3'-phosphorothioate 5'phosphate
  modified_base 2: mod_base = OTHER; note = 2'-deoxy-2'-fluorocytidine-3'-phosphorothioate
  modified_base 3: mod_base = OTHER; note = 2'-O-methyluridine-3'-phosphate
  modified_base 4: mod_base = OTHER; note = 2'-O-methyluridine-3'-phosphate
  modified_base 5: mod_base = OTHER; note = 2'-O-methyluridine-3'-phosphate
  modified_base 6: mod_base = OTHER; note = 2'-deoxy-2'-fluorocytidine-3'-phosphate
  modified_base 7: mod_base = OTHER; note = 2'-O-methyladenosine-3'-phosphate
  modified_base 8: mod_base = OTHER; note = 2'-deoxy-2'-fluorocytidine-3'-phosphate
  modified_base 9: mod_base = OTHER; note = 2'-deoxy-2'-fluorouridine-3'-phosphate
  modified_base 10: mod_base = OTHER; note = 2'-O-methyluridine-3'-phosphate
  modified_base 11: mod_base = OTHER; note = 2'-O-methyluridine-3'-phosphate
  modified_base 12: mod_base = OTHER; note = 2'-O-methylcytidine-3'-phosphate
  modified_base 13: mod_base = OTHER; note = 2'-O-methyluridine-3'-phosphate
  modified_base 14: mod_base = OTHER; note = 2'-deoxy-2'-fluorouridine-3'-phosphate
  modified_base 15: mod_base = OTHER; note = 2'-O-methylguanosine-3'-phosphate
  modified_base 16: mod_base = OTHER; note = 2'-deoxy-2'-fluoroguanosine-3'-phosphate
  modified_base 17: mod_base = OTHER; note = 2'-O-methylguanosine-3'-phosphate
  modified_base 18: mod_base = OTHER; note = 2'-O-methylcytidine-3'-phosphate
  modified_base 19: mod_base = OTHER; note = 2'-O-methyluridine-3'-phosphate
  modified_base 20: mod_base = OTHER; note = 2'-O-methylcytidine-3'-phosphate
  modified_base 21: mod_base = OTHER; note = 2'-O-methylcytidine-3'-phosphorothioate
  modified_base 22: mod_base = OTHER; note = 2'-O-methyladenosine-3'-phosphorothioate
  modified_base 23: mod_base = OTHER; note = 2'-O-methyladenosine
tctttcactttcttgggctccaa

SEQ ID NO: 2197 - RNA, 23 nt, synthetic construct
  source 1..23: mol_type = other RNA
  modified_base 1: mod_base = OTHER; note = 2'-O-methyluridine-3'-phosphorothioate
  modified_base 2: mod_base = OTHER; note = 2'-deoxy-2'-fluorouridine-3'-phosphorothioate
  modified_base 3: mod_base = OTHER; note = 2'-O-methylcytidine-3'-phosphate
  modified_base 4: mod_base = OTHER; note = 2'-O-methyluridine-3'-phosphate
  modified_base 5: mod_base = OTHER; note = 2'-O-methyluridine-3'-phosphate
  modified_base 6: mod_base = OTHER; note = 2'-deoxy-2'-fluorouridine-3'-phosphate
  modified_base 7: mod_base = OTHER; note = 2'-O-methylcytidine-3'-phosphate
  modified_base 8: mod_base = OTHER; note = 2'-deoxy-2'-fluoroadenosine-3'-phosphate
  modified_base 9: mod_base = OTHER; note = 2'-deoxy-2'-fluorocytidine-3'-phosphate
  modified_base 10: mod_base = OTHER; note = 2'-O-methyluridine-3'-phosphate
  modified_base 11: mod_base = OTHER; note = 2'-O-methyluridine-3'-phosphate
  modified_base 12: mod_base = OTHER; note = 2'-O-methyluridine-3'-phosphate
  modified_base 13: mod_base = OTHER; note = 2'-O-methylcytidine-3'-phosphate
  modified_base 14: mod_base = OTHER; note = 2'-deoxy-2'-fluorouridine-3'-phosphate
  modified_base 15: mod_base = OTHER; note = 2'-O-methyluridine-3'-phosphate
  modified_base 16: mod_base = OTHER; note = 2'-deoxy-2'-fluoroguanosine-3'-phosphate
  modified_base 17: mod_base = OTHER; note = 2'-O-methylguanosine-3'-phosphate
  modified_base 18: mod_base = OTHER; note = 2'-O-methylguanosine-3'-phosphate
  modified_base 19: mod_base = OTHER; note = 2'-O-methylcytidine-3'-phosphate
  modified_base 20: mod_base = OTHER; note = 2'-O-methyluridine-3'-phosphate
  modified_base 21: mod_base = OTHER; note = 2'-O-methylcytidine-3'-phosphorothioate
  modified_base 22: mod_base = OTHER; note = 2'-O-methylcytidine-3'-phosphorothioate
  modified_base 23: mod_base = OTHER; note = 2'-O-methyladenosine
ttctttcactttcttgggctcca

SEQ ID NO: 2198 - RNA, 23 nt, synthetic construct
  source 1..23: mol_type = other RNA
  modified_base 1: mod_base = OTHER; note = 2'-O-methyluridine-3'-phosphorothioate 5'phosphate
  modified_base 2: mod_base = OTHER; note = 2'-deoxy-2'-fluorouridine-3'-phosphorothioate
  modified_base 3: mod_base = OTHER; note = 2'-O-methylcytidine-3'-phosphate
  modified_base 4: mod_base = OTHER; note = 2'-O-methyluridine-3'-phosphate
  modified_base 5: mod_base = OTHER; note = 2'-O-methyluridine-3'-phosphate
  modified_base 6: mod_base = OTHER; note = 2'-deoxy-2'-fluorouridine-3'-phosphate
  modified_base 7: mod_base = OTHER; note = 2'-O-methylcytidine-3'-phosphate
  modified_base 8: mod_base = OTHER; note = 2'-deoxy-2'-fluoroadenosine-3'-phosphate
  modified_base 9: mod_base = OTHER; note = 2'-deoxy-2'-fluorocytidine-3'-phosphate
  modified_base 10: mod_base = OTHER; note = 2'-O-methyluridine-3'-phosphate
  modified_base 11: mod_base = OTHER; note = 2'-O-methyluridine-3'-phosphate
  modified_base 12: mod_base = OTHER; note = 2'-O-methyluridine-3'-phosphate
  modified_base 13: mod_base = OTHER; note = 2'-O-methylcytidine-3'-phosphate
  modified_base 14: mod_base = OTHER; note = 2'-deoxy-2'-fluorouridine-3'-phosphate
  modified_base 15: mod_base = OTHER; note = 2'-O-methyluridine-3'-phosphate
  modified_base 16: mod_base = OTHER; note = 2'-deoxy-2'-fluoroguanosine-3'-phosphate
  modified_base 17: mod_base = OTHER; note = 2'-O-methylguanosine-3'-phosphate
  modified_base 18: mod_base = OTHER; note = 2'-O-methylguanosine-3'-phosphate
  modified_base 19: mod_base = OTHER; note = 2'-O-methylcytidine-3'-phosphate
  modified_base 20: mod_base = OTHER; note = 2'-O-methyluridine-3'-phosphate
  modified_base 21: mod_base = OTHER; note = 2'-O-methylcytidine-3'-phosphorothioate
  modified_base 22: mod_base = OTHER; note = 2'-O-methylcytidine-3'-phosphorothioate
  modified_base 23: mod_base = OTHER; note = 2'-O-methyladenosine
ttctttcactttcttgggctcca

SEQ ID NO: 2199 - RNA, 23 nt, synthetic construct
  source 1..23: mol_type = other RNA
  modified_base 1: mod_base = OTHER; note = 2'-O-methyluridine-3'-phosphorothioate
  modified_base 2: mod_base = OTHER; note = 2'-deoxy-2'-fluoroguanosine-3'-phosphorothioate
  modified_base 3: mod_base = OTHER; note = 2'-O-methylguanosine-3'-phosphate
  modified_base 4: mod_base = OTHER; note = 2'-O-methyluridine-3'-phosphate
  modified_base 5: mod_base = OTHER; note = 2'-O-methylcytidine-3'-phosphate
  modified_base 6: mod_base = OTHER; note = 2'-deoxy-2'-fluorouridine-3'-phosphate
  modified_base 7: mod_base = OTHER; note = 2'-O-methyluridine-3'-phosphate
  modified_base 8: mod_base = OTHER; note = 2'-deoxy-2'-fluorouridine-3'-phosphate
  modified_base 9: mod_base = OTHER; note = 2'-deoxy-2'-fluorocytidine-3'-phosphate
  modified_base 10: mod_base = OTHER; note = 2'-O-methyladenosine-3'-phosphate
  modified_base 11: mod_base = OTHER; note = 2'-O-methylcytidine-3'-phosphate
  modified_base 12: mod_base = OTHER; note = 2'-O-methyluridine-3'-phosphate
  modified_base 13: mod_base = OTHER; note = 2'-O-methyluridine-3'-phosphate
  modified_base 14: mod_base = OTHER; note = 2'-deoxy-2'-fluorouridine-3'-phosphate
  modified_base 15: mod_base = OTHER; note = 2'-O-methylcytidine-3'-phosphate
  modified_base 16: mod_base = OTHER; note = 2'-deoxy-2'-fluorouridine-3'-phosphate
  modified_base 17: mod_base = OTHER; note = 2'-O-methyluridine-3'-phosphate
  modified_base 18: mod_base = OTHER; note = 2'-O-methylguanosine-3'-phosphate
  modified_base 19: mod_base = OTHER; note = 2'-O-methylguanosine-3'-phosphate
  modified_base 20: mod_base = OTHER; note = 2'-O-methylguanosine-3'-phosphate
  modified_base 21: mod_base = OTHER; note = 2'-O-methylcytidine-3'-phosphorothioate
  modified_base 22: mod_base = OTHER; note = 2'-O-methyluridine-3'-phosphorothioate
  modified_base 23: mod_base = OTHER; note = 2'-O-methylcytidine
tggtctttcactttcttgggctc

SEQ ID NO: 2200 - RNA, 23 nt, synthetic construct
  source 1..23: mol_type = other RNA
  modified_base 1: mod_base = OTHER; note = 2'-O-methyluridine-3'-phosphorothioate 5'phosphate
  modified_base 2: mod_base = OTHER; note = 2'-deoxy-2'-fluoroguanosine-3'-phosphorothioate
  modified_base 3: mod_base = OTHER; note = 2'-O-methylguanosine-3'-phosphate
  modified_base 4: mod_base = OTHER; note = 2'-O-methyluridine-3'-phosphate
  modified_base 5: mod_base = OTHER; note = 2'-O-methylcytidine-3'-phosphate
  modified_base 6: mod_base = OTHER; note = 2'-deoxy-2'-fluorouridine-3'-phosphate
  modified_base 7: mod_base = OTHER; note = 2'-O-methyluridine-3'-phosphate
  modified_base 8: mod_base = OTHER; note = 2'-deoxy-2'-fluorouridine-3'-phosphate
  modified_base 9: mod_base = OTHER; note = 2'-deoxy-2'-fluorocytidine-3'-phosphate
  modified_base 10: mod_base = OTHER; note = 2'-O-methyladenosine-3'-phosphate
  modified_base 11: mod_base = OTHER; note = 2'-O-methylcytidine-3'-phosphate
  modified_base 12: mod_base = OTHER; note = 2'-O-methyluridine-3'-phosphate
  modified_base 13: mod_base = OTHER; note = 2'-O-methyluridine-3'-phosphate
  modified_base 14: mod_base = OTHER; note = 2'-deoxy-2'-fluorouridine-3'-phosphate
  modified_base 15: mod_base = OTHER; note = 2'-O-methylcytidine-3'-phosphate
  modified_base 16: mod_base = OTHER; note = 2'-deoxy-2'-fluorouridine-3'-phosphate
  modified_base 17: mod_base = OTHER; note = 2'-O-methyluridine-3'-phosphate
  modified_base 18: mod_base = OTHER; note = 2'-O-methylguanosine-3'-phosphate
  modified_base 19: mod_base = OTHER; note = 2'-O-methylguanosine-3'-phosphate
  modified_base 20: mod_base = OTHER; note = 2'-O-methylguanosine-3'-phosphate
  modified_base 21: mod_base = OTHER; note = 2'-O-methylcytidine-3'-phosphorothioate
  modified_base 22: mod_base = OTHER; note = 2'-O-methyluridine-3'-phosphorothioate
  modified_base 23: mod_base = OTHER; note = 2'-O-methylcytidine
tggtctttcactttcttgggctc

SEQ ID NO: 2201 - RNA, 23 nt, synthetic construct
  source 1..23: mol_type = other RNA
  modified_base 1: mod_base = OTHER; note = 2'-O-methyluridine-3'-phosphorothioate
  modified_base 2: mod_base = OTHER; note = 2'-deoxy-2'-fluorouridine-3'-phosphorothioate
  modified_base 3: mod_base = OTHER; note = 2'-O-methylguanosine-3'-phosphate
  modified_base 4: mod_base = OTHER; note = 2'-O-methylguanosine-3'-phosphate
  modified_base 5: mod_base = OTHER; note = 2'-O-methyluridine-3'-phosphate
  modified_base 6: mod_base = OTHER; note = 2'-deoxy-2'-fluorocytidine-3'-phosphate
  modified_base 7: mod_base = OTHER; note = 2'-O-methyluridine-3'-phosphate
  modified_base 8: mod_base = OTHER; note = 2'-deoxy-2'-fluorouridine-3'-phosphate
  modified_base 9: mod_base = OTHER; note = 2'-deoxy-2'-fluorouridine-3'-phosphate
  modified_base 10: mod_base = OTHER; note = 2'-O-methylcytidine-3'-phosphate
  modified_base 11: mod_base = OTHER; note = 2'-O-methyladenosine-3'-phosphate
  modified_base 12: mod_base = OTHER; note = 2'-O-methylcytidine-3'-phosphate
  modified_base 13: mod_base = OTHER; note = 2'-O-methyluridine-3'-phosphate
  modified_base 14: mod_base = OTHER; note = 2'-deoxy-2'-fluorouridine-3'-phosphate
  modified_base 15: mod_base = OTHER; note = 2'-O-methyluridine-3'-phosphate
  modified_base 16: mod_base = OTHER; note = 2'-deoxy-2'-fluorocytidine-3'-phosphate
  modified_base 17: mod_base = OTHER; note = 2'-O-methyluridine-3'-phosphate
  modified_base 18: mod_base = OTHER; note = 2'-O-methyluridine-3'-phosphate
  modified_base 19: mod_base = OTHER; note = 2'-O-methylguanosine-3'-phosphate
  modified_base 20: mod_base = OTHER; note = 2'-O-methylguanosine-3'-phosphate
  modified_base 21: mod_base = OTHER; note = 2'-O-methylguanosine-3'-phosphorothioate
  modified_base 22: mod_base = OTHER; note = 2'-O-methylcytidine-3'-phosphorothioate
  modified_base 23: mod_base = OTHER; note = 2'-O-methyluridine
ttggtctttcactttcttgggct

SEQ ID NO: 2202 - RNA, 23 nt, synthetic construct
  source 1..23: mol_type = other RNA
  modified_base 1: mod_base = OTHER; note = 2'-O-methyluridine-3'-phosphorothioate 5'phosphate
  modified_base 2: mod_base = OTHER; note = 2'-deoxy-2'-fluorouridine-3'-phosphorothioate
  modified_base 3: mod_base = OTHER; note = 2'-O-methylguanosine-3'-phosphate
  modified_base 4: mod_base = OTHER; note = 2'-O-methylguanosine-3'-phosphate
  modified_base 5: mod_base = OTHER; note = 2'-O-methyluridine-3'-phosphate
  modified_base 6: mod_base = OTHER; note = 2'-deoxy-2'-fluorocytidine-3'-phosphate
  modified_base 7: mod_base = OTHER; note = 2'-O-methyluridine-3'-phosphate
  modified_base 8: mod_base = OTHER; note = 2'-deoxy-2'-fluorouridine-3'-phosphate
  modified_base 9: mod_base = OTHER; note = 2'-deoxy-2'-fluorouridine-3'-phosphate
  modified_base 10: mod_base = OTHER; note = 2'-O-methylcytidine-3'-phosphate
  modified_base 11: mod_base = OTHER; note = 2'-O-methyladenosine-3'-phosphate
  modified_base 12: mod_base = OTHER; note = 2'-O-methylcytidine-3'-phosphate
  modified_base 13: mod_base = OTHER; note = 2'-O-methyluridine-3'-phosphate
  modified_base 14: mod_base = OTHER; note = 2'-deoxy-2'-fluorouridine-3'-phosphate
  modified_base 15: mod_base = OTHER; note = 2'-O-methyluridine-3'-phosphate
  modified_base 16: mod_base = OTHER; note = 2'-deoxy-2'-fluorocytidine-3'-phosphate
  modified_base 17: mod_base = OTHER; note = 2'-O-methyluridine-3'-phosphate
  modified_base 18: mod_base = OTHER; note = 2'-O-methyluridine-3'-phosphate
  modified_base 19: mod_base = OTHER; note = 2'-O-methylguanosine-3'-phosphate
  modified_base 20: mod_base = OTHER; note = 2'-O-methylguanosine-3'-phosphate
  modified_base 21: mod_base = OTHER; note = 2'-O-methylguanosine-3'-phosphorothioate
  modified_base 22: mod_base = OTHER; note = 2'-O-methylcytidine-3'-phosphorothioate
  modified_base 23: mod_base = OTHER; note = 2'-O-methyluridine
ttggtctttcactttcttgggct

SEQ ID NO: 2203 - RNA, 23 nt, synthetic construct
  source 1..23: mol_type = other RNA
  modified_base 1: mod_base = OTHER; note = 2'-O-methyluridine-3'-phosphorothioate
  modified_base 2: mod_base = OTHER; note = 2'-deoxy-2'-fluoroguanosine-3'-phosphorothioate
  modified_base 3: mod_base = OTHER; note = 2'-O-methylguanosine-3'-phosphate
  modified_base 4: mod_base = OTHER; note = 2'-O-methylcytidine-3'-phosphate
  modified_base 5: mod_base = OTHER; note = 2'-O-methyluridine-3'-phosphate
  modified_base 6: mod_base = OTHER; note = 2'-deoxy-2'-fluorocytidine-3'-phosphate
  modified_base 7: mod_base = OTHER; note = 2'-O-methyladenosine-3'-phosphate
  modified_base 8: mod_base = OTHER; note = 2'-deoxy-2'-fluoroadenosine-3'-phosphate
  modified_base 9: mod_base = OTHER; note = 2'-deoxy-2'-fluoroadenosine-3'-phosphate
  modified_base 10: mod_base = OTHER; note = 2'-O-methylguanosine-3'-phosphate
  modified_base 11: mod_base = OTHER; note = 2'-O-methylcytidine-3'-phosphate
  modified_base 12: mod_base = OTHER; note = 2'-O-methyladenosine-3'-phosphate
  modified_base 13: mod_base = OTHER; note = 2'-O-methyluridine-3'-phosphate
  modified_base 14: mod_base = OTHER; note = 2'-deoxy-2'-fluorouridine-3'-phosphate
  modified_base 15: mod_base = OTHER; note = 2'-O-methyluridine-3'-phosphate
  modified_base 16: mod_base = OTHER; note = 2'-deoxy-2'-fluorocytidine-3'-phosphate
  modified_base 17: mod_base = OTHER; note = 2'-O-methyluridine-3'-phosphate
  modified_base 18: mod_base = OTHER; note = 2'-O-methylcytidine-3'-phosphate
  modified_base 19: mod_base = OTHER; note = 2'-O-methyluridine-3'-phosphate
  modified_base 20: mod_base = OTHER; note = 2'-O-methyluridine-3'-phosphate
  modified_base 21: mod_base = OTHER; note = 2'-O-methyluridine-3'-phosphorothioate
  modified_base 22: mod_base = OTHER; note = 2'-O-methylcytidine-3'-phosphorothioate
  modified_base 23: mod_base = OTHER; note = 2'-O-methyluridine
tggctcaaagcatttctctttct

SEQ ID NO: 2204 - RNA, 23 nt, synthetic construct
  source 1..23: mol_type = other RNA
  modified_base 1: mod_base = OTHER; note = 2'-O-methyluridine-3'-phosphorothioate 5'phosphate
  modified_base 2: mod_base = OTHER; note = 2'-deoxy-2'-fluoroguanosine-3'-phosphorothioate
  modified_base 3: mod_base = OTHER; note = 2'-O-methylguanosine-3'-phosphate
  modified_base 4: mod_base = OTHER; note = 2'-O-methylcytidine-3'-phosphate
  modified_base 5: mod_base = OTHER; note = 2'-O-methyluridine-3'-phosphate
  modified_base 6: mod_base = OTHER; note = 2'-deoxy-2'-fluorocytidine-3'-phosphate
  modified_base 7: mod_base = OTHER; note = 2'-O-methyladenosine-3'-phosphate
  modified_base 8: mod_base = OTHER; note = 2'-deoxy-2'-fluoroadenosine-3'-phosphate
  modified_base 9: mod_base = OTHER; note = 2'-deoxy-2'-fluoroadenosine-3'-phosphate
  modified_base 10: mod_base = OTHER; note = 2'-O-methylguanosine-3'-phosphate
  modified_base 11: mod_base = OTHER; note = 2'-O-methylcytidine-3'-phosphate
  modified_base 12: mod_base = OTHER; note = 2'-O-methyladenosine-3'-phosphate
  modified_base 13: mod_base = OTHER; note = 2'-O-methyluridine-3'-phosphate
  modified_base 14: mod_base = OTHER; note = 2'-deoxy-2'-fluorouridine-3'-phosphate
  modified_base 15: mod_base = OTHER; note = 2'-O-methyluridine-3'-phosphate
  modified_base 16: mod_base = OTHER; note = 2'-deoxy-2'-fluorocytidine-3'-phosphate
  modified_base 17: mod_base = OTHER; note = 2'-O-methyluridine-3'-phosphate
  modified_base 18: mod_base = OTHER; note = 2'-O-methylcytidine-3'-phosphate
  modified_base 19: mod_base = OTHER; note = 2'-O-methyluridine-3'-phosphate
  modified_base 20: mod_base = OTHER; note = 2'-O-methyluridine-3'-phosphate
  modified_base 21: mod_base = OTHER; note = 2'-O-methyluridine-3'-phosphorothioate
  modified_base 22: mod_base = OTHER; note = 2'-O-methylcytidine-3'-phosphorothioate
  modified_base 23: mod_base = OTHER; note = 2'-O-methyluridine
tggctcaaagcatttctctttct

SEQ ID NO: 2205 - RNA, 23 nt, synthetic construct
  source 1..23: mol_type = other RNA
  modified_base 1: mod_base = OTHER; note = 2'-O-methyluridine-3'-phosphorothioate
  modified_base 2: mod_base = OTHER; note = 2'-deoxy-2'-fluoroadenosine-3'-phosphorothioate
  modified_base 3: mod_base = OTHER; note = 2'-O-methylguanosine-3'-phosphate
  modified_base 4: mod_base = OTHER; note = 2'-O-methylguanosine-3'-phosphate
  modified_base 5: mod_base = OTHER; note = 2'-O-methylcytidine-3'-phosphate
  modified_base 6: mod_base = OTHER; note = 2'-deoxy-2'-fluorouridine-3'-phosphate
  modified_base 7: mod_base = OTHER; note = 2'-O-methylcytidine-3'-phosphate
  modified_base 8: mod_base = OTHER; note = 2'-deoxy-2'-fluoroadenosine-3'-phosphate
  modified_base 9: mod_base = OTHER; note = 2'-deoxy-2'-fluoroadenosine-3'-phosphate
  modified_base 10: mod_base = OTHER; note = 2'-O-methyladenosine-3'-phosphate
  modified_base 11: mod_base = OTHER; note = 2'-O-methylguanosine-3'-phosphate
  modified_base 12: mod_base = OTHER; note = 2'-O-methylcytidine-3'-phosphate
  modified_base 13: mod_base = OTHER; note = 2'-O-methyladenosine-3'-phosphate
  modified_base 14: mod_base = OTHER; note = 2'-deoxy-2'-fluorouridine-3'-phosphate
  modified_base 15: mod_base = OTHER; note = 2'-O-methyluridine-3'-phosphate
  modified_base 16: mod_base = OTHER; note = 2'-deoxy-2'-fluorouridine-3'-phosphate
  modified_base 17: mod_base = OTHER; note = 2'-O-methylcytidine-3'-phosphate
  modified_base 18: mod_base = OTHER; note = 2'-O-methyluridine-3'-phosphate
  modified_base 19: mod_base = OTHER; note = 2'-O-methylcytidine-3'-phosphate
  modified_base 20: mod_base = OTHER; note = 2'-O-methyluridine-3'-phosphate
  modified_base 21: mod_base = OTHER; note = 2'-O-methyluridine-3'-phosphorothioate
  modified_base 22: mod_base = OTHER; note = 2'-O-methyluridine-3'-phosphorothioate
  modified_base 23: mod_base = OTHER; note = 2'-O-methylcytidine
taggctcaaagcatttctctttc

SEQ ID NO: 2206 - RNA, 23 nt, synthetic construct
  source 1..23: mol_type = other RNA
  modified_base 1: mod_base = OTHER; note = 2'-O-methyluridine-3'-phosphorothioate 5'phosphate
  modified_base 2: mod_base = OTHER; note = 2'-deoxy-2'-fluoroadenosine-3'-phosphorothioate
  modified_base 3: mod_base = OTHER; note = 2'-O-methylguanosine-3'-phosphate
  modified_base 4: mod_base = OTHER; note = 2'-O-methylguanosine-3'-phosphate
  modified_base 5: mod_base = OTHER; note = 2'-O-methylcytidine-3'-phosphate
  modified_base 6: mod_base = OTHER; note = 2'-deoxy-2'-fluorouridine-3'-phosphate
  modified_base 7: mod_base = OTHER; note = 2'-O-methylcytidine-3'-phosphate
  modified_base 8: mod_base = OTHER; note = 2'-deoxy-2'-fluoroadenosine-3'-phosphate
  modified_base 9: mod_base = OTHER; note = 2'-deoxy-2'-fluoroadenosine-3'-phosphate
  modified_base 10: mod_base = OTHER; note = 2'-O-methyladenosine-3'-phosphate
  modified_base 11: mod_base = OTHER; note = 2'-O-methylguanosine-3'-phosphate
  modified_base 12: mod_base = OTHER; note = 2'-O-methylcytidine-3'-phosphate
  modified_base 13: mod_base = OTHER; note = 2'-O-methyladenosine-3'-phosphate
  modified_base 14: mod_base = OTHER; note = 2'-deoxy-2'-fluorouridine-3'-phosphate
  modified_base 15: mod_base = OTHER; note = 2'-O-methyluridine-3'-phosphate
  modified_base 16: mod_base = OTHER; note = 2'-deoxy-2'-fluorouridine-3'-phosphate
  modified_base 17: mod_base = OTHER; note = 2'-O-methylcytidine-3'-phosphate
  modified_base 18: mod_base = OTHER; note = 2'-O-methyluridine-3'-phosphate
  modified_base 19: mod_base = OTHER; note = 2'-O-methylcytidine-3'-phosphate
  modified_base 20: mod_base = OTHER; note = 2'-O-methyluridine-3'-phosphate
  modified_base 21: mod_base = OTHER; note = 2'-O-methyluridine-3'-phosphorothioate
  modified_base 22: mod_base = OTHER; note = 2'-O-methyluridine-3'-phosphorothioate
  modified_base 23: mod_base = OTHER; note = 2'-O-methylcytidine
taggctcaaagcatttctctttc

SEQ ID NO: 2207 - RNA, 23 nt, synthetic construct
  source 1..23: mol_type = other RNA
  modified_base 1: mod_base = OTHER; note = 2'-O-methyluridine-3'-phosphorothioate
  modified_base 2: mod_base = OTHER; note = 2'-deoxy-2'-fluoroguanosine-3'-phosphorothioate
  modified_base 3: mod_base = OTHER; note = 2'-O-methyladenosine-3'-phosphate
  modified_base 4: mod_base = OTHER; note = 2'-O-methylguanosine-3'-phosphate
  modified_base 5: mod_base = OTHER; note = 2'-O-methylguanosine-3'-phosphate
  modified_base 6: mod_base = OTHER; note = 2'-deoxy-2'-fluorocytidine-3'-phosphate
  modified_base 7: mod_base = OTHER; note = 2'-O-methyluridine-3'-phosphate
  modified_base 8: mod_base = OTHER; note = 2'-deoxy-2'-fluorocytidine-3'-phosphate
  modified_base 9: mod_base = OTHER; note = 2'-deoxy-2'-fluoroadenosine-3'-phosphate
  modified_base 10: mod_base = OTHER; note = 2'-O-methyladenosine-3'-phosphate
  modified_base 11: mod_base = OTHER; note = 2'-O-methyladenosine-3'-phosphate
  modified_base 12: mod_base = OTHER; note = 2'-O-methylguanosine-3'-phosphate
  modified_base 13: mod_base = OTHER; note = 2'-O-methylcytidine-3'-phosphate
  modified_base 14: mod_base = OTHER; note = 2'-deoxy-2'-fluoroadenosine-3'-phosphate
  modified_base 15: mod_base = OTHER; note = 2'-O-methyluridine-3'-phosphate
  modified_base 16: mod_base = OTHER; note = 2'-deoxy-2'-fluorouridine-3'-phosphate
  modified_base 17: mod_base = OTHER; note = 2'-O-methyluridine-3'-phosphate
  modified_base 18: mod_base = OTHER; note = 2'-O-methylcytidine-3'-phosphate
  modified_base 19: mod_base = OTHER; note = 2'-O-methyluridine-3'-phosphate
  modified_base 20: mod_base = OTHER; note = 2'-O-methylcytidine-3'-phosphate
  modified_base 21: mod_base = OTHER; note = 2'-O-methyluridine-3'-phosphorothioate
  modified_base 22: mod_base = OTHER; note = 2'-O-methyluridine-3'-phosphorothioate
  modified_base 23: mod_base = OTHER; note = 2'-O-methyluridine
tgaggctcaaagcatttctcttt

SEQ ID NO: 2208 - RNA, 23 nt, synthetic construct
  source 1..23: mol_type = other RNA
  modified_base 1: mod_base = OTHER; note = 2'-O-methyluridine-3'-phosphorothioate 5'phosphate
  modified_base 2: mod_base = OTHER; note = 2'-deoxy-2'-fluoroguanosine-3'-phosphorothioate
  modified_base 3: mod_base = OTHER; note = 2'-O-methyladenosine-3'-phosphate
  modified_base 4: mod_base = OTHER; note = 2'-O-methylguanosine-3'-phosphate
  modified_base 5: mod_base = OTHER; note = 2'-O-methylguanosine-3'-phosphate
  modified_base 6: mod_base = OTHER; note = 2'-deoxy-2'-fluorocytidine-3'-phosphate
  modified_base 7: mod_base = OTHER; note = 2'-O-methyluridine-3'-phosphate
  modified_base 8: mod_base = OTHER; note = 2'-deoxy-2'-fluorocytidine-3'-phosphate
  modified_base 9: mod_base = OTHER; note = 2'-deoxy-2'-fluoroadenosine-3'-phosphate
  modified_base 10: mod_base = OTHER; note = 2'-O-methyladenosine-3'-phosphate
  modified_base 11: mod_base = OTHER; note = 2'-O-methyladenosine-3'-phosphate
  modified_base 12: mod_base = OTHER; note = 2'-O-methylguanosine-3'-phosphate
  modified_base 13: mod_base = OTHER; note = 2'-O-methylcytidine-3'-phosphate
  modified_base 14: mod_base = OTHER; note = 2'-deoxy-2'-fluoroadenosine-3'-phosphate
  modified_base 15: mod_base = OTHER; note = 2'-O-methyluridine-3'-phosphate
  modified_base 16: mod_base = OTHER; note = 2'-deoxy-2'-fluorouridine-3'-phosphate
  modified_base 17: mod_base = OTHER; note = 2'-O-methyluridine-3'-phosphate
  modified_base 18: mod_base = OTHER; note = 2'-O-methylcytidine-3'-phosphate
  modified_base 19: mod_base = OTHER; note = 2'-O-methyluridine-3'-phosphate
  modified_base 20: mod_base = OTHER; note = 2'-O-methylcytidine-3'-phosphate
  modified_base 21: mod_base = OTHER; note = 2'-O-methyluridine-3'-phosphorothioate
  modified_base 22: mod_base = OTHER; note = 2'-O-methyluridine-3'-phosphorothioate
  modified_base 23: mod_base = OTHER; note = 2'-O-methyluridine
tgaggctcaaagcatttctcttt

SEQ ID NO: 2209 - RNA, 23 nt, synthetic construct
  source 1..23: mol_type = other RNA
  modified_base 1: mod_base = OTHER; note = 2'-O-methyluridine-3'-phosphorothioate
  modified_base 2: mod_base = OTHER; note = 2'-deoxy-2'-fluorouridine-3'-phosphorothioate
  modified_base 3: mod_base = OTHER; note = 2'-O-methylguanosine-3'-phosphate
  modified_base 4: mod_base = OTHER; note = 2'-O-methyladenosine-3'-phosphate
  modified_base 5: mod_base = OTHER; note = 2'-O-methylguanosine-3'-phosphate
  modified_base 6: mod_base = OTHER; note = 2'-deoxy-2'-fluoroguanosine-3'-phosphate
  modified_base 7: mod_base = OTHER; note = 2'-O-methylcytidine-3'-phosphate
  modified_base 8: mod_base = OTHER; note = 2'-deoxy-2'-fluorouridine-3'-phosphate
  modified_base 9: mod_base = OTHER; note = 2'-deoxy-2'-fluorocytidine-3'-phosphate
  modified_base 10: mod_base = OTHER; note = 2'-O-methyladenosine-3'-phosphate
  modified_base 11: mod_base = OTHER; note = 2'-O-methyladenosine-3'-phosphate
  modified_base 12: mod_base = OTHER; note = 2'-O-methyladenosine-3'-phosphate
  modified_base 13: mod_base = OTHER; note = 2'-O-methylguanosine-3'-phosphate
  modified_base 14: mod_base = OTHER; note = 2'-deoxy-2'-fluorocytidine-3'-phosphate
  modified_base 15: mod_base = OTHER; note = 2'-O-methyladenosine-3'-phosphate
  modified_base 16: mod_base = OTHER; note = 2'-deoxy-2'-fluorouridine-3'-phosphate
  modified_base 17: mod_base = OTHER; note = 2'-O-methyluridine-3'-phosphate
  modified_base 18: mod_base = OTHER; note = 2'-O-methyluridine-3'-phosphate
  modified_base 19: mod_base = OTHER; note = 2'-O-methylcytidine-3'-phosphate
  modified_base 20: mod_base = OTHER; note = 2'-O-methyluridine-3'-phosphate
  modified_base 21: mod_base = OTHER; note = 2'-O-methylcytidine-3'-phosphorothioate
  modified_base 22: mod_base = OTHER; note = 2'-O-methyluridine-3'-phosphorothioate
  modified_base 23: mod_base = OTHER; note = 2'-O-methyluridine
ttgaggctcaaagcatttctctt

SEQ ID NO: 2210 - RNA, 23 nt, synthetic construct
  source 1..23: mol_type = other RNA
  modified_base 1: mod_base = OTHER; note = 2'-O-methyluridine-3'-phosphorothioate 5'phosphate
  modified_base 2: mod_base = OTHER; note = 2'-deoxy-2'-fluorouridine-3'-phosphorothioate
  modified_base 3: mod_base = OTHER; note = 2'-O-methylguanosine-3'-phosphate
  modified_base 4: mod_base = OTHER; note = 2'-O-methyladenosine-3'-phosphate
  modified_base 5: mod_base = OTHER; note = 2'-O-methylguanosine-3'-phosphate
  modified_base 6: mod_base = OTHER; note = 2'-deoxy-2'-fluoroguanosine-3'-phosphate
  modified_base 7: mod_base = OTHER; note = 2'-O-methylcytidine-3'-phosphate
  modified_base 8: mod_base = OTHER; note = 2'-deoxy-2'-fluorouridine-3'-phosphate
  modified_base 9: mod_base = OTHER; note = 2'-deoxy-2'-fluorocytidine-3'-phosphate
  modified_base 10: mod_base = OTHER; note = 2'-O-methyladenosine-3'-phosphate
  modified_base 11: mod_base = OTHER; note = 2'-O-methyladenosine-3'-phosphate
  modified_base 12: mod_base = OTHER; note = 2'-O-methyladenosine-3'-phosphate
  modified_base 13: mod_base = OTHER; note = 2'-O-methylguanosine-3'-phosphate
  modified_base 14: mod_base = OTHER; note = 2'-deoxy-2'-fluorocytidine-3'-phosphate
  modified_base 15: mod_base = OTHER; note = 2'-O-methyladenosine-3'-phosphate
  modified_base 16: mod_base = OTHER; note = 2'-deoxy-2'-fluorouridine-3'-phosphate
  modified_base 17: mod_base = OTHER; note = 2'-O-methyluridine-3'-phosphate
  modified_base 18: mod_base = OTHER; note = 2'-O-methyluridine-3'-phosphate
  modified_base 19: mod_base = OTHER; note = 2'-O-methylcytidine-3'-phosphate
  modified_base 20: mod_base = OTHER; note = 2'-O-methyluridine-3'-phosphate
  modified_base 21: mod_base = OTHER; note = 2'-O-methylcytidine-3'-phosphorothioate
  modified_base 22: mod_base = OTHER; note = 2'-O-methyluridine-3'-phosphorothioate
  modified_base 23: mod_base = OTHER; note = 2'-O-methyluridine
ttgaggctcaaagcatttctctt

SEQ ID NO: 2211 - RNA, 23 nt, synthetic construct
  source 1..23: mol_type = other RNA
  modified_base 1: mod_base = OTHER; note = 2'-O-methyluridine-3'-phosphorothioate
  modified_base 2: mod_base = OTHER; note = 2'-deoxy-2'-fluorocytidine-3'-phosphorothioate
  modified_base 3: mod_base = OTHER; note = 2'-O-methyluridine-3'-phosphate
  modified_base 4: mod_base = OTHER; note = 2'-O-methylguanosine-3'-phosphate
  modified_base 5: mod_base = OTHER; note = 2'-O-methyladenosine-3'-phosphate
  modified_base 6: mod_base = OTHER; note = 2'-deoxy-2'-fluoroguanosine-3'-phosphate
  modified_base 7: mod_base = OTHER; note = 2'-O-methylguanosine-3'-phosphate
  modified_base 8: mod_base = OTHER; note = 2'-deoxy-2'-fluorocytidine-3'-phosphate
  modified_base 9: mod_base = OTHER; note = 2'-deoxy-2'-fluorouridine-3'-phosphate
  modified_base 10: mod_base = OTHER; note = 2'-O-methylcytidine-3'-phosphate
  modified_base 11: mod_base = OTHER; note = 2'-O-methyladenosine-3'-phosphate
  modified_base 12: mod_base = OTHER; note = 2'-O-methyladenosine-3'-phosphate
  modified_base 13: mod_base = OTHER; note = 2'-O-methyladenosine-3'-phosphate
  modified_base 14: mod_base = OTHER; note = 2'-deoxy-2'-fluoroguanosine-3'-phosphate
  modified_base 15: mod_base = OTHER; note = 2'-O-methylcytidine-3'-phosphate
  modified_base 16: mod_base = OTHER; note = 2'-deoxy-2'-fluoroadenosine-3'-phosphate
  modified_base 17: mod_base = OTHER; note = 2'-O-methyluridine-3'-phosphate
  modified_base 18: mod_base = OTHER; note = 2'-O-methyluridine-3'-phosphate
  modified_base 19: mod_base = OTHER; note = 2'-O-methyluridine-3'-phosphate
  modified_base 20: mod_base = OTHER; note = 2'-O-methylcytidine-3'-phosphate
  modified_base 21: mod_base = OTHER; note = 2'-O-methyluridine-3'-phosphorothioate
  modified_base 22: mod_base = OTHER; note = 2'-O-methylcytidine-3'-phosphorothioate
  modified_base 23: mod_base = OTHER; note = 2'-O-methyluridine
tctgaggctcaaagcatttctct

SEQ ID NO: 2212 - RNA, 23 nt, synthetic construct
  source 1..23: mol_type = other RNA
  modified_base 1: mod_base = OTHER; note = 2'-O-methyluridine-3'-phosphorothioate 5'phosphate
  modified_base 2: mod_base = OTHER; note = 2'-deoxy-2'-fluorocytidine-3'-phosphorothioate
  modified_base 3: mod_base = OTHER; note = 2'-O-methyluridine-3'-phosphate
  modified_base 4: mod_base = OTHER; note = 2'-O-methylguanosine-3'-phosphate
  modified_base 5: mod_base = OTHER; note = 2'-O-methyladenosine-3'-phosphate
  modified_base 6: mod_base = OTHER; note = 2'-deoxy-2'-fluoroguanosine-3'-phosphate
  modified_base 7: mod_base = OTHER; note = 2'-O-methylguanosine-3'-phosphate
  modified_base 8: mod_base = OTHER; note = 2'-deoxy-2'-fluorocytidine-3'-phosphate
  modified_base 9: mod_base = OTHER; note = 2'-deoxy-2'-fluorouridine-3'-phosphate
  modified_base 10: mod_base = OTHER; note = 2'-O-methylcytidine-3'-phosphate
  modified_base 11: mod_base = OTHER; note = 2'-O-methyladenosine-3'-phosphate
  modified_base 12: mod_base = OTHER; note = 2'-O-methyladenosine-3'-phosphate
  modified_base 13: mod_base = OTHER; note = 2'-O-methyladenosine-3'-phosphate
  modified_base 14: mod_base = OTHER; note = 2'-deoxy-2'-fluoroguanosine-3'-phosphate
  modified_base 15: mod_base = OTHER; note = 2'-O-methylcytidine-3'-phosphate
  modified_base 16: mod_base = OTHER; note = 2'-deoxy-2'-fluoroadenosine-3'-phosphate
  modified_base 17: mod_base = OTHER; note = 2'-O-methyluridine-3'-phosphate
  modified_base 18: mod_base = OTHER; note = 2'-O-methyluridine-3'-phosphate
  modified_base 19: mod_base = OTHER; note = 2'-O-methyluridine-3'-phosphate
  modified_base 20: mod_base = OTHER; note = 2'-O-methylcytidine-3'-phosphate
  modified_base 21: mod_base = OTHER; note = 2'-O-methyluridine-3'-phosphorothioate
  modified_base 22: mod_base = OTHER; note = 2'-O-methylcytidine-3'-phosphorothioate
  modified_base 23: mod_base = OTHER; note = 2'-O-methyluridine
tctgaggctcaaagcatttctct

SEQ ID NO: 2213 - RNA, 23 nt, synthetic construct
  source 1..23: mol_type = other RNA
  modified_base 1: mod_base = OTHER; note = 2'-O-methyluridine-3'-phosphorothioate
  modified_base 2: mod_base = OTHER; note = 2'-deoxy-2'-fluoroadenosine-3'-phosphorothioate
  modified_base 3: mod_base = OTHER; note = 2'-O-methylguanosine-3'-phosphate
  modified_base 4: mod_base = OTHER; note = 2'-O-methylcytidine-3'-phosphate
  modified_base 5: mod_base = OTHER; note = 2'-O-methyluridine-3'-phosphate
  modified_base 6: mod_base = OTHER; note = 2'-deoxy-2'-fluoroguanosine-3'-phosphate
  modified_base 7: mod_base = OTHER; note = 2'-O-methyladenosine-3'-phosphate
  modified_base 8: mod_base = OTHER; note = 2'-deoxy-2'-fluoroguanosine-3'-phosphate
  modified_base 9: mod_base = OTHER; note = 2'-deoxy-2'-fluoroguanosine-3'-phosphate
  modified_base 10: mod_base = OTHER; note = 2'-O-methylcytidine-3'-phosphate
  modified_base 11: mod_base = OTHER; note = 2'-O-methyluridine-3'-phosphate
  modified_base 12: mod_base = OTHER; note = 2'-O-methylcytidine-3'-phosphate
  modified_base 13: mod_base = OTHER; note = 2'-O-methyladenosine-3'-phosphate
  modified_base 14: mod_base = OTHER; note = 2'-deoxy-2'-fluoroadenosine-3'-phosphate
  modified_base 15: mod_base = OTHER; note = 2'-O-methyladenosine-3'-phosphate
  modified_base 16: mod_base = OTHER; note = 2'-deoxy-2'-fluoroguanosine-3'-phosphate
  modified_base 17: mod_base = OTHER; note = 2'-O-methylcytidine-3'-phosphate
  modified_base 18: mod_base = OTHER; note = 2'-O-methyladenosine-3'-phosphate
  modified_base 19: mod_base = OTHER; note = 2'-O-methyluridine-3'-phosphate
  modified_base 20: mod_base = OTHER; note = 2'-O-methyluridine-3'-phosphate
  modified_base 21: mod_base = OTHER; note = 2'-O-methyluridine-3'-phosphorothioate
  modified_base 22: mod_base = OTHER; note = 2'-O-methylcytidine-3'-phosphorothioate
  modified_base 23: mod_base = OTHER; note = 2'-O-methyluridine
tagctgaggctcaaagcatttct

SEQ ID NO: 2214 - RNA, 23 nt, synthetic construct
  source 1..23: mol_type = other RNA
  modified_base 1: mod_base = OTHER; note = 2'-O-methyluridine-3'-phosphorothioate 5'phosphate
  modified_base 2: mod_base = OTHER; note = 2'-deoxy-2'-fluoroadenosine-3'-phosphorothioate
  modified_base 3: mod_base = OTHER; note = 2'-O-methylguanosine-3'-phosphate
  modified_base 4: mod_base = OTHER; note = 2'-O-methylcytidine-3'-phosphate
  modified_base 5: mod_base = OTHER; note = 2'-O-methyluridine-3'-phosphate
  modified_base 6: mod_base = OTHER; note = 2'-deoxy-2'-fluoroguanosine-3'-phosphate
  modified_base 7: mod_base = OTHER; note = 2'-O-methyladenosine-3'-phosphate
  modified_base 8: mod_base = OTHER; note = 2'-deoxy-2'-fluoroguanosine-3'-phosphate
  modified_base 9: mod_base = OTHER; note = 2'-deoxy-2'-fluoroguanosine-3'-phosphate
  modified_base 10: mod_base = OTHER; note = 2'-O-methylcytidine-3'-phosphate
  modified_base 11: mod_base = OTHER; note = 2'-O-methyluridine-3'-phosphate
  modified_base 12: mod_base = OTHER; note = 2'-O-methylcytidine-3'-phosphate
  modified_base 13: mod_base = OTHER; note = 2'-O-methyladenosine-3'-phosphate
  modified_base 14: mod_base = OTHER; note = 2'-deoxy-2'-fluoroadenosine-3'-phosphate
  modified_base 15: mod_base = OTHER; note = 2'-O-methyladenosine-3'-phosphate
  modified_base 16: mod_base = OTHER; note = 2'-deoxy-2'-fluoroguanosine-3'-phosphate
  modified_base 17: mod_base = OTHER; note = 2'-O-methylcytidine-3'-phosphate
  modified_base 18: mod_base = OTHER; note = 2'-O-methyladenosine-3'-phosphate
  modified_base 19: mod_base = OTHER; note = 2'-O-methyluridine-3'-phosphate
  modified_base 20: mod_base = OTHER; note = 2'-O-methyluridine-3'-phosphate
  modified_base 21: mod_base = OTHER; note = 2'-O-methyluridine-3'-phosphorothioate
  modified_base 22: mod_base = OTHER; note = 2'-O-methylcytidine-3'-phosphorothioate
  modified_base 23: mod_base = OTHER; note = 2'-O-methyluridine
tagctgaggctcaaagcatttct

SEQ ID NO: 2215 - RNA, 23 nt, synthetic construct
  source 1..23: mol_type = other RNA
  modified_base 1: mod_base = OTHER; note = 2'-O-methyluridine-3'-phosphorothioate
  modified_base 2: mod_base = OTHER; note = 2'-deoxy-2'-fluoroguanosine-3'-phosphorothioate
  modified_base 3: mod_base = OTHER; note = 2'-O-methyladenosine-3'-phosphate
  modified_base 4: mod_base = OTHER; note = 2'-O-methyladenosine-3'-phosphate
  modified_base 5: mod_base = OTHER; note = 2'-O-methylguanosine-3'-phosphate
  modified_base 6: mod_base = OTHER; note = 2'-deoxy-2'-fluorocytidine-3'-phosphate
  modified_base 7: mod_base = OTHER; note = 2'-O-methyluridine-3'-phosphate
  modified_base 8: mod_base = OTHER; note = 2'-deoxy-2'-fluoroguanosine-3'-phosphate
  modified_base 9: mod_base = OTHER; note = 2'-deoxy-2'-fluoroadenosine-3'-phosphate
  modified_base 10: mod_base = OTHER; note = 2'-O-methylguanosine-3'-phosphate
  modified_base 11: mod_base = OTHER; note = 2'-O-methylguanosine-3'-phosphate
  modified_base 12: mod_base = OTHER; note = 2'-O-methylcytidine-3'-phosphate
  modified_base 13: mod_base = OTHER; note = 2'-O-methyluridine-3'-phosphate
  modified_base 14: mod_base = OTHER; note = 2'-deoxy-2'-fluorocytidine-3'-phosphate
  modified_base 15: mod_base = OTHER; note = 2'-O-methyladenosine-3'-phosphate
  modified_base 16: mod_base = OTHER; note = 2'-deoxy-2'-fluoroadenosine-3'-phosphate
  modified_base 17: mod_base = OTHER; note = 2'-O-methyladenosine-3'-phosphate
  modified_base 18: mod_base = OTHER; note = 2'-O-methylguanosine-3'-phosphate
  modified_base 19: mod_base = OTHER; note = 2'-O-methylcytidine-3'-phosphate
  modified_base 20: mod_base = OTHER; note = 2'-O-methyladenosine-3'-phosphate
  modified_base 21: mod_base = OTHER; note = 2'-O-methyluridine-3'-phosphorothioate
  modified_base 22: mod_base = OTHER; note = 2'-O-methyluridine-3'-phosphorothioate
  modified_base 23: mod_base = OTHER; note = 2'-O-methyluridine
tgaagctgaggctcaaagcattt

SEQ ID NO: 2216 - RNA, 23 nt, synthetic construct
  source 1..23: mol_type = other RNA
  modified_base 1: mod_base = OTHER; note = 2'-O-methyluridine-3'-phosphorothioate 5'phosphate
  modified_base 2: mod_base = OTHER; note = 2'-deoxy-2'-fluoroguanosine-3'-phosphorothioate
  modified_base 3: mod_base = OTHER; note = 2'-O-methyladenosine-3'-phosphate
  modified_base 4: mod_base = OTHER; note = 2'-O-methyladenosine-3'-phosphate
  modified_base 5: mod_base = OTHER; note = 2'-O-methylguanosine-3'-phosphate
  modified_base 6: mod_base = OTHER; note = 2'-deoxy-2'-fluorocytidine-3'-phosphate
  modified_base 7: mod_base = OTHER; note = 2'-O-methyluridine-3'-phosphate
  modified_base 8: mod_base = OTHER; note = 2'-deoxy-2'-fluoroguanosine-3'-phosphate
  modified_base 9: mod_base = OTHER; note = 2'-deoxy-2'-fluoroadenosine-3'-phosphate
  modified_base 10: mod_base = OTHER; note = 2'-O-methylguanosine-3'-phosphate
  modified_base 11: mod_base = OTHER; note = 2'-O-methylguanosine-3'-phosphate
  modified_base 12: mod_base = OTHER; note = 2'-O-methylcytidine-3'-phosphate
  modified_base 13: mod_base = OTHER; note = 2'-O-methyluridine-3'-phosphate
  modified_base 14: mod_base = OTHER; note = 2'-deoxy-2'-fluorocytidine-3'-phosphate
  modified_base 15: mod_base = OTHER; note = 2'-O-methyladenosine-3'-phosphate
  modified_base 16: mod_base = OTHER; note = 2'-deoxy-2'-fluoroadenosine-3'-phosphate
  modified_base 17: mod_base = OTHER; note = 2'-O-methyladenosine-3'-phosphate
  modified_base 18: mod_base = OTHER; note = 2'-O-methylguanosine-3'-phosphate
  modified_base 19: mod_base = OTHER; note = 2'-O-methylcytidine-3'-phosphate
  modified_base 20: mod_base = OTHER; note = 2'-O-methyladenosine-3'-phosphate
  modified_base 21: mod_base = OTHER; note = 2'-O-methyluridine-3'-phosphorothioate
  modified_base 22: mod_base = OTHER; note = 2'-O-methyluridine-3'-phosphorothioate
  modified_base 23: mod_base = OTHER; note = 2'-O-methyluridine
tgaagctgaggctcaaagcattt

SEQ ID NO: 2217 - RNA, 23 nt, synthetic construct
  source 1..23: mol_type = other RNA
  modified_base 1: mod_base = OTHER; note = 2'-O-methyluridine-3'-phosphorothioate
  modified_base 2: mod_base = OTHER; note = 2'-deoxy-2'-fluoroadenosine-3'-phosphorothioate
  modified_base 3: mod_base = OTHER; note = 2'-O-methylguanosine-3'-phosphate
  modified_base 4: mod_base = OTHER; note = 2'-O-methyladenosine-3'-phosphate
  modified_base 5: mod_base = OTHER; note = 2'-O-methyladenosine-3'-phosphate
  modified_base 6: mod_base = OTHER; note = 2'-deoxy-2'-fluoroguanosine-3'-phosphate
  modified_base 7: mod_base = OTHER; note = 2'-O-methylcytidine-3'-phosphate
  modified_base 8: mod_base = OTHER; note = 2'-deoxy-2'-fluorouridine-3'-phosphate
  modified_base 9: mod_base = OTHER; note = 2'-deoxy-2'-fluoroguanosine-3'-phosphate
  modified_base 10: mod_base = OTHER; note = 2'-O-methyladenosine-3'-phosphate
  modified_base 11: mod_base = OTHER; note = 2'-O-methylguanosine-3'-phosphate
  modified_base 12: mod_base = OTHER; note = 2'-O-methylguanosine-3'-phosphate
  modified_base 13: mod_base = OTHER; note = 2'-O-methylcytidine-3'-phosphate
  modified_base 14: mod_base = OTHER; note = 2'-deoxy-2'-fluorouridine-3'-phosphate
  modified_base 15: mod_base = OTHER; note = 2'-O-methylcytidine-3'-phosphate
  modified_base 16: mod_base = OTHER; note = 2'-deoxy-2'-fluoroadenosine-3'-phosphate
  modified_base 17: mod_base = OTHER; note = 2'-O-methyladenosine-3'-phosphate
  modified_base 18: mod_base = OTHER; note = 2'-O-methyladenosine-3'-phosphate
  modified_base 19: mod_base = OTHER; note = 2'-O-methylguanosine-3'-phosphate
  modified_base 20: mod_base = OTHER; note = 2'-O-methylcytidine-3'-phosphate
  modified_base 21: mod_base = OTHER; note = 2'-O-methyladenosine-3'-phosphorothioate
  modified_base 22: mod_base = OTHER; note = 2'-O-methyluridine-3'-phosphorothioate
  modified_base 23: mod_base = OTHER; note = 2'-O-methyluridine
tagaagctgaggctcaaagcatt

SEQ ID NO: 2218 - RNA, 23 nt, synthetic construct
  source 1..23: mol_type = other RNA
  modified_base 1: mod_base = OTHER; note = 2'-O-methyluridine-3'-phosphorothioate 5'phosphate
  modified_base 2: mod_base = OTHER; note = 2'-deoxy-2'-fluoroadenosine-3'-phosphorothioate
  modified_base 3: mod_base = OTHER; note = 2'-O-methylguanosine-3'-phosphate
  modified_base 4: mod_base = OTHER; note = 2'-O-methyladenosine-3'-phosphate
  modified_base 5: mod_base = OTHER; note = 2'-O-methyladenosine-3'-phosphate
  modified_base 6: mod_base = OTHER; note = 2'-deoxy-2'-fluoroguanosine-3'-phosphate
  modified_base 7: mod_base = OTHER; note = 2'-O-methylcytidine-3'-phosphate
  modified_base 8: mod_base = OTHER; note = 2'-deoxy-2'-fluorouridine-3'-phosphate
  modified_base 9: mod_base = OTHER; note = 2'-deoxy-2'-fluoroguanosine-3'-phosphate
  modified_base 10: mod_base = OTHER; note = 2'-O-methyladenosine-3'-phosphate
  modified_base 11: mod_base = OTHER; note = 2'-O-methylguanosine-3'-phosphate
  modified_base 12: mod_base = OTHER; note = 2'-O-methylguanosine-3'-phosphate
  modified_base 13: mod_base = OTHER; note = 2'-O-methylcytidine-3'-phosphate
  modified_base 14: mod_base = OTHER; note = 2'-deoxy-2'-fluorouridine-3'-phosphate
  modified_base 15: mod_base = OTHER; note = 2'-O-methylcytidine-3'-phosphate
  modified_base 16: mod_base = OTHER; note = 2'-deoxy-2'-fluoroadenosine-3'-phosphate
  modified_base 17: mod_base = OTHER; note = 2'-O-methyladenosine-3'-phosphate
  modified_base 18: mod_base = OTHER; note = 2'-O-methyladenosine-3'-phosphate
  modified_base 19: mod_base = OTHER; note = 2'-O-methylguanosine-3'-phosphate
  modified_base 20: mod_base = OTHER; note = 2'-O-methylcytidine-3'-phosphate
  modified_base 21: mod_base = OTHER; note = 2'-O-methyladenosine-3'-phosphorothioate
  modified_base 22: mod_base = OTHER; note = 2'-O-methyluridine-3'-phosphorothioate
  modified_base 23: mod_base = OTHER; note = 2'-O-methyluridine
tagaagctgaggctcaaagcatt

SEQ ID NO: 2219 - RNA, 23 nt, synthetic construct
  source 1..23: mol_type = other RNA
  modified_base 1: mod_base = OTHER; note = 2'-O-methyluridine-3'-phosphorothioate
  modified_base 2: mod_base = OTHER; note = 2'-deoxy-2'-fluoroguanosine-3'-phosphorothioate
  modified_base 3: mod_base = OTHER; note = 2'-O-methyladenosine-3'-phosphate
  modified_base 4: mod_base = OTHER; note = 2'-O-methylguanosine-3'-phosphate
  modified_base 5: mod_base = OTHER; note = 2'-O-methyladenosine-3'-phosphate
  modified_base 6: mod_base = OTHER; note = 2'-deoxy-2'-fluoroadenosine-3'-phosphate
  modified_base 7: mod_base = OTHER; note = 2'-O-methylguanosine-3'-phosphate
  modified_base 8: mod_base = OTHER; note = 2'-deoxy-2'-fluorocytidine-3'-phosphate
  modified_base 9: mod_base = OTHER; note = 2'-deoxy-2'-fluorouridine-3'-phosphate
  modified_base 10: mod_base = OTHER; note = 2'-O-methylguanosine-3'-phosphate
  modified_base 11: mod_base = OTHER; note = 2'-O-methyladenosine-3'-phosphate
  modified_base 12: mod_base = OTHER; note = 2'-O-methylguanosine-3'-phosphate
  modified_base 13: mod_base = OTHER; note = 2'-O-methylguanosine-3'-phosphate
  modified_base 14: mod_base = OTHER; note = 2'-deoxy-2'-fluorocytidine-3'-phosphate
  modified_base 15: mod_base = OTHER; note = 2'-O-methyluridine-3'-phosphate
  modified_base 16: mod_base = OTHER; note = 2'-deoxy-2'-fluorocytidine-3'-phosphate
  modified_base 17: mod_base = OTHER; note = 2'-O-methyladenosine-3'-phosphate
  modified_base 18: mod_base = OTHER; note = 2'-O-methyladenosine-3'-phosphate
  modified_base 19: mod_base = OTHER; note = 2'-O-methyladenosine-3'-phosphate
  modified_base 20: mod_base = OTHER; note = 2'-O-methylguanosine-3'-phosphate
  modified_base 21: mod_base = OTHER; note = 2'-O-methylcytidine-3'-phosphorothioate
  modified_base 22: mod_base = OTHER; note = 2'-O-methyladenosine-3'-phosphorothioate
  modified_base 23: mod_base = OTHER; note = 2'-O-methyluridine
tgagaagctgaggctcaaagcat

SEQ ID NO: 2220 - RNA, 23 nt, synthetic construct
  source 1..23: mol_type = other RNA
  modified_base 1: mod_base = OTHER; note = 2'-O-methyluridine-3'-phosphorothioate 5'phosphate
  modified_base 2: mod_base = OTHER; note = 2'-deoxy-2'-fluoroguanosine-3'-phosphorothioate
  modified_base 3: mod_base = OTHER; note = 2'-O-methyladenosine-3'-phosphate
  modified_base 4: mod_base = OTHER; note = 2'-O-methylguanosine-3'-phosphate
  modified_base 5: mod_base = OTHER; note = 2'-O-methyladenosine-3'-phosphate
  modified_base 6: mod_base = OTHER; note = 2'-deoxy-2'-fluoroadenosine-3'-phosphate
  modified_base 7: mod_base = OTHER; note = 2'-O-methylguanosine-3'-phosphate
  modified_base 8: mod_base = OTHER; note = 2'-deoxy-2'-fluorocytidine-3'-phosphate
  modified_base 9: mod_base = OTHER; note = 2'-deoxy-2'-fluorouridine-3'-phosphate
  modified_base 10: mod_base = OTHER; note = 2'-O-methylguanosine-3'-phosphate
  modified_base 11: mod_base = OTHER; note = 2'-O-methyladenosine-3'-phosphate
  modified_base 12: mod_base = OTHER; note = 2'-O-methylguanosine-3'-phosphate
  modified_base 13: mod_base = OTHER; note = 2'-O-methylguanosine-3'-phosphate
  modified_base 14: mod_base = OTHER; note = 2'-deoxy-2'-fluorocytidine-3'-phosphate
  modified_base 15: mod_base = OTHER; note = 2'-O-methyluridine-3'-phosphate
  modified_base 16: mod_base = OTHER; note = 2'-deoxy-2'-fluorocytidine-3'-phosphate
  modified_base 17: mod_base = OTHER; note = 2'-O-methyladenosine-3'-phosphate
  modified_base 18: mod_base = OTHER; note = 2'-O-methyladenosine-3'-phosphate
  modified_base 19: mod_base = OTHER; note = 2'-O-methyladenosine-3'-phosphate
  modified_base 20: mod_base = OTHER; note = 2'-O-methylguanosine-3'-phosphate
  modified_base 21: mod_base = OTHER; note = 2'-O-methylcytidine-3'-phosphorothioate
  modified_base 22: mod_base = OTHER; note = 2'-O-methyladenosine-3'-phosphorothioate
  modified_base 23: mod_base = OTHER; note = 2'-O-methyluridine
tgagaagctgaggctcaaagcat

SEQ ID NO: 2221 - RNA, 23 nt, synthetic construct
  source 1..23: mol_type = other RNA
  modified_base 1: mod_base = OTHER; note = 2'-O-methyluridine-3'-phosphorothioate
  modified_base 2: mod_base = OTHER; note = 2'-deoxy-2'-fluorocytidine-3'-phosphorothioate
  modified_base 3: mod_base = OTHER; note = 2'-O-methyluridine-3'-phosphate
  modified_base 4: mod_base = OTHER; note = 2'-O-methylcytidine-3'-phosphate
  modified_base 5: mod_base = OTHER; note = 2'-O-methylcytidine-3'-phosphate
  modified_base 6: mod_base = OTHER; note = 2'-deoxy-2'-fluorouridine-3'-phosphate
  modified_base 7: mod_base = OTHER; note = 2'-O-methylguanosine-3'-phosphate
  modified_base 8: mod_base = OTHER; note = 2'-deoxy-2'-fluorocytidine-3'-phosphate
  modified_base 9: mod_base = OTHER; note = 2'-deoxy-2'-fluoroadenosine-3'-phosphate
  modified_base 10: mod_base = OTHER; note = 2'-O-methylguanosine-3'-phosphate
  modified_base 11: mod_base = OTHER; note = 2'-O-methylguanosine-3'-phosphate
  modified_base 12: mod_base = OTHER; note = 2'-O-methyladenosine-3'-phosphate
  modified_base 13: mod_base = OTHER; note = 2'-O-methyladenosine-3'-phosphate
  modified_base 14: mod_base = OTHER; note = 2'-deoxy-2'-fluoroguanosine-3'-phosphate
  modified_base 15: mod_base = OTHER; note = 2'-O-methylguanosine-3'-phosphate
  modified_base 16: mod_base = OTHER; note = 2'-deoxy-2'-fluorouridine-3'-phosphate
  modified_base 17: mod_base = OTHER; note = 2'-O-methylguanosine-3'-phosphate
  modified_base 18: mod_base = OTHER; note = 2'-O-methylguanosine-3'-phosphate
  modified_base 19: mod_base = OTHER; note = 2'-O-methyladenosine-3'-phosphate
  modified_base 20: mod_base = OTHER; note = 2'-O-methylguanosine-3'-phosphate
  modified_base 21: mod_base = OTHER; note = 2'-O-methyluridine-3'-phosphorothioate
  modified_base 22: mod_base = OTHER; note = 2'-O-methyladenosine-3'-phosphorothioate
  modified_base 23: mod_base = OTHER; note = 2'-O-methyluridine
tctcctgcaggaaggtggagtat

SEQ ID NO: 2222 - RNA, 23 nt, synthetic construct
  source 1..23: mol_type = other RNA
  modified_base 1: mod_base = OTHER; note = 2'-O-methyluridine-3'-phosphorothioate 5'phosphate
  modified_base 2: mod_base = OTHER; note = 2'-deoxy-2'-fluorocytidine-3'-phosphorothioate
  modified_base 3: mod_base = OTHER; note = 2'-O-methyluridine-3'-phosphate
  modified_base 4: mod_base = OTHER; note = 2'-O-methylcytidine-3'-phosphate
  modified_base 5: mod_base = OTHER; note = 2'-O-methylcytidine-3'-phosphate
  modified_base 6: mod_base = OTHER; note = 2'-deoxy-2'-fluorouridine-3'-phosphate
  modified_base 7: mod_base = OTHER; note = 2'-O-methylguanosine-3'-phosphate
  modified_base 8: mod_base = OTHER; note = 2'-deoxy-2'-fluorocytidine-3'-phosphate
  modified_base 9: mod_base = OTHER; note = 2'-deoxy-2'-fluoroadenosine-3'-phosphate
  modified_base 10: mod_base = OTHER; note = 2'-O-methylguanosine-3'-phosphate
  modified_base 11: mod_base = OTHER; note = 2'-O-methylguanosine-3'-phosphate
  modified_base 12: mod_base = OTHER; note = 2'-O-methyladenosine-3'-phosphate
  modified_base 13: mod_base = OTHER; note = 2'-O-methyladenosine-3'-phosphate
  modified_base 14: mod_base = OTHER; note = 2'-deoxy-2'-fluoroguanosine-3'-phosphate
  modified_base 15: mod_base = OTHER; note = 2'-O-methylguanosine-3'-phosphate
  modified_base 16: mod_base = OTHER; note = 2'-deoxy-2'-fluorouridine-3'-phosphate
  modified_base 17: mod_base = OTHER; note = 2'-O-methylguanosine-3'-phosphate
  modified_base 18: mod_base = OTHER; note = 2'-O-methylguanosine-3'-phosphate
  modified_base 19: mod_base = OTHER; note = 2'-O-methyladenosine-3'-phosphate
  modified_base 20: mod_base = OTHER; note = 2'-O-methylguanosine-3'-phosphate
  modified_base 21: mod_base = OTHER; note = 2'-O-methyluridine-3'-phosphorothioate
  modified_base 22: mod_base = OTHER; note = 2'-O-methyladenosine-3'-phosphorothioate
  modified_base 23: mod_base = OTHER; note = 2'-O-methyluridine
tctcctgcaggaaggtggagtat

SEQ ID NO: 2223 - RNA, 23 nt, synthetic construct
  source 1..23: mol_type = other RNA
  modified_base 1: mod_base = OTHER; note = 2'-O-methyluridine-3'-phosphorothioate
  modified_base 2: mod_base = OTHER; note = 2'-deoxy-2'-fluorocytidine-3'-phosphorothioate
  modified_base 3: mod_base = OTHER; note = 2'-O-methyladenosine-3'-phosphate
  modified_base 4: mod_base = OTHER; note = 2'-O-methylcytidine-3'-phosphate
  modified_base 5: mod_base = OTHER; note = 2'-O-methyluridine-3'-phosphate
  modified_base 6: mod_base = OTHER; note = 2'-deoxy-2'-fluorouridine-3'-phosphate
  modified_base 7: mod_base = OTHER; note = 2'-O-methyluridine-3'-phosphate
  modified_base 8: mod_base = OTHER; note = 2'-deoxy-2'-fluoroadenosine-3'-phosphate
  modified_base 9: mod_base = OTHER; note = 2'-deoxy-2'-fluorouridine-3'-phosphate
  modified_base 10: mod_base = OTHER; note = 2'-O-methyluridine-3'-phosphate
  modified_base 11: mod_base = OTHER; note = 2'-O-methylguanosine-3'-phosphate
  modified_base 12: mod_base = OTHER; note = 2'-O-methyladenosine-3'-phosphate
  modified_base 13: mod_base = OTHER; note = 2'-O-methylguanosine-3'-phosphate
  modified_base 14: mod_base = OTHER; note = 2'-deoxy-2'-fluorouridine-3'-phosphate
  modified_base 15: mod_base = OTHER; note = 2'-O-methyluridine-3'-phosphate
  modified_base 16: mod_base = OTHER; note = 2'-deoxy-2'-fluorouridine-3'-phosphate
  modified_base 17: mod_base = OTHER; note = 2'-O-methylcytidine-3'-phosphate
  modified_base 18: mod_base = OTHER; note = 2'-O-methyluridine-3'-phosphate
  modified_base 19: mod_base = OTHER; note = 2'-O-methylguanosine-3'-phosphate
  modified_base 20: mod_base = OTHER; note = 2'-O-methyluridine-3'-phosphate
  modified_base 21: mod_base = OTHER; note = 2'-O-methylguanosine-3'-phosphorothioate
  modified_base 22: mod_base = OTHER; note = 2'-O-methylcytidine-3'-phosphorothioate
  modified_base 23: mod_base = OTHER; note = 2'-O-methylcytidine
tcactttattgagtttctgtgcc

SEQ ID NO: 2224 - RNA, 23 nt, synthetic construct
  source 1..23: mol_type = other RNA
  modified_base 1: mod_base = OTHER; note = 2'-O-methyluridine-3'-phosphorothioate 5'phosphate
  modified_base 2: mod_base = OTHER; note = 2'-deoxy-2'-fluorocytidine-3'-phosphorothioate
  modified_base 3: mod_base = OTHER; note = 2'-O-methyladenosine-3'-phosphate
  modified_base 4: mod_base = OTHER; note = 2'-O-methylcytidine-3'-phosphate
  modified_base 5: mod_base = OTHER; note = 2'-O-methyluridine-3'-phosphate
  modified_base 6: mod_base = OTHER; note = 2'-deoxy-2'-fluorouridine-3'-phosphate
  modified_base 7: mod_base = OTHER; note = 2'-O-methyluridine-3'-phosphate
  modified_base 8: mod_base = OTHER; note = 2'-deoxy-2'-fluoroadenosine-3'-phosphate
  modified_base 9: mod_base = OTHER; note = 2'-deoxy-2'-fluorouridine-3'-phosphate
  modified_base 10: mod_base = OTHER; note = 2'-O-methyluridine-3'-phosphate
  modified_base 11: mod_base = OTHER; note = 2'-O-methylguanosine-3'-phosphate
  modified_base 12: mod_base = OTHER; note = 2'-O-methyladenosine-3'-phosphate
  modified_base 13: mod_base = OTHER; note = 2'-O-methylguanosine-3'-phosphate
  modified_base 14: mod_base = OTHER; note = 2'-deoxy-2'-fluorouridine-3'-phosphate
  modified_base 15: mod_base = OTHER; note = 2'-O-methyluridine-3'-phosphate
  modified_base 16: mod_base = OTHER; note = 2'-deoxy-2'-fluorouridine-3'-phosphate
  modified_base 17: mod_base = OTHER; note = 2'-O-methylcytidine-3'-phosphate
  modified_base 18: mod_base = OTHER; note = 2'-O-methyluridine-3'-phosphate
  modified_base 19: mod_base = OTHER; note = 2'-O-methylguanosine-3'-phosphate
  modified_base 20: mod_base = OTHER; note = 2'-O-methyluridine-3'-phosphate
  modified_base 21: mod_base = OTHER; note = 2'-O-methylguanosine-3'-phosphorothioate
  modified_base 22: mod_base = OTHER; note = 2'-O-methylcytidine-3'-phosphorothioate
  modified_base 23: mod_base = OTHER; note = 2'-O-methylcytidine
tcactttattgagtttctgtgcc

SEQ ID NO: 2225 - RNA, 23 nt, synthetic construct
  source 1..23: mol_type = other RNA
  modified_base 1: mod_base = OTHER; note = 2'-O-methyluridine-3'-phosphorothioate
  modified_base 2: mod_base = OTHER; note = 2'-deoxy-2'-fluoroguanosine-3'-phosphorothioate
  modified_base 3: mod_base = OTHER; note = 2'-O-methylcytidine-3'-phosphate
  modified_base 4: mod_base = OTHER; note = 2'-O-methyladenosine-3'-phosphate
  modified_base 5: mod_base = OTHER; note = 2'-O-methylcytidine-3'-phosphate
  modified_base 6: mod_base = OTHER; note = 2'-deoxy-2'-fluorouridine-3'-phosphate
  modified_base 7: mod_base = OTHER; note = 2'-O-methyluridine-3'-phosphate
  modified_base 8: mod_base = OTHER; note = 2'-deoxy-2'-fluorouridine-3'-phosphate
  modified_base 9: mod_base = OTHER; note = 2'-deoxy-2'-fluoroadenosine-3'-phosphate
  modified_base 10: mod_base = OTHER; note = 2'-O-methyluridine-3'-phosphate
  modified_base 11: mod_base = OTHER; note = 2'-O-methyluridine-3'-phosphate
  modified_base 12: mod_base = OTHER; note = 2'-O-methylguanosine-3'-phosphate
  modified_base 13: mod_base = OTHER; note = 2'-O-methyladenosine-3'-phosphate
  modified_base 14: mod_base = OTHER; note = 2'-deoxy-2'-fluoroguanosine-3'-phosphate
  modified_base 15: mod_base = OTHER; note = 2'-O-methyluridine-3'-phosphate
  modified_base 16: mod_base = OTHER; note = 2'-deoxy-2'-fluorouridine-3'-phosphate
  modified_base 17: mod_base = OTHER; note = 2'-O-methyluridine-3'-phosphate
  modified_base 18: mod_base = OTHER; note = 2'-O-methylcytidine-3'-phosphate
  modified_base 19: mod_base = OTHER; note = 2'-O-methyluridine-3'-phosphate
  modified_base 20: mod_base = OTHER; note = 2'-O-methylguanosine-3'-phosphate
  modified_base 21: mod_base = OTHER; note = 2'-O-methyluridine-3'-phosphorothioate
  modified_base 22: mod_base = OTHER; note = 2'-O-methylguanosine-3'-phosphorothioate
  modified_base 23: mod_base = OTHER; note = 2'-O-methylcytidine
tgcactttattgagtttctgtgc

SEQ ID NO: 2226 - RNA, 23 nt, synthetic construct
  source 1..23: mol_type = other RNA
  modified_base 1: mod_base = OTHER; note = 2'-O-methyluridine-3'-phosphorothioate 5'phosphate
  modified_base 2: mod_base = OTHER; note = 2'-deoxy-2'-fluoroguanosine-3'-phosphorothioate
  modified_base 3: mod_base = OTHER; note = 2'-O-methylcytidine-3'-phosphate
  modified_base 4: mod_base = OTHER; note = 2'-O-methyladenosine-3'-phosphate
  modified_base 5: mod_base = OTHER; note = 2'-O-methylcytidine-3'-phosphate
  modified_base 6: mod_base = OTHER; note = 2'-deoxy-2'-fluorouridine-3'-phosphate
  modified_base 7: mod_base = OTHER; note = 2'-O-methyluridine-3'-phosphate
  modified_base 8: mod_base = OTHER; note = 2'-deoxy-2'-fluorouridine-3'-phosphate
  modified_base 9: mod_base = OTHER; note = 2'-deoxy-2'-fluoroadenosine-3'-phosphate
  modified_base 10: mod_base = OTHER; note = 2'-O-methyluridine-3'-phosphate
  modified_base 11: mod_base = OTHER; note = 2'-O-methyluridine-3'-phosphate
  modified_base 12: mod_base = OTHER; note = 2'-O-methylguanosine-3'-phosphate
  modified_base 13: mod_base = OTHER; note = 2'-O-methyladenosine-3'-phosphate
  modified_base 14: mod_base = OTHER; note = 2'-deoxy-2'-fluoroguanosine-3'-phosphate
  modified_base 15: mod_base = OTHER; note = 2'-O-methyluridine-3'-phosphate
  modified_base 16: mod_base = OTHER; note = 2'-deoxy-2'-fluorouridine-3'-phosphate
  modified_base 17: mod_base = OTHER; note = 2'-O-methyluridine-3'-phosphate
  modified_base 18: mod_base = OTHER; note = 2'-O-methylcytidine-3'-phosphate
  modified_base 19: mod_base = OTHER; note = 2'-O-methyluridine-3'-phosphate
  modified_base 20: mod_base = OTHER; note = 2'-O-methylguanosine-3'-phosphate
  modified_base 21: mod_base = OTHER; note = 2'-O-methyluridine-3'-phosphorothioate
  modified_base 22: mod_base = OTHER; note = 2'-O-methylguanosine-3'-phosphorothioate
  modified_base 23: mod_base = OTHER; note = 2'-O-methylcytidine
tgcactttattgagtttctgtgc

SEQ ID NO: 2227 - RNA, 23 nt, synthetic construct
  source 1..23: mol_type = other RNA
  modified_base 1: mod_base = OTHER; note = 2'-O-methyluridine-3'-phosphorothioate
  modified_base 2: mod_base = OTHER; note = 2'-deoxy-2'-fluoroadenosine-3'-phosphorothioate
  modified_base 3: mod_base = OTHER; note = 2'-O-methylguanosine-3'-phosphate
  modified_base 4: mod_base = OTHER; note = 2'-O-methylcytidine-3'-phosphate
  modified_base 5: mod_base = OTHER; note = 2'-O-methyladenosine-3'-phosphate
  modified_base 6: mod_base = OTHER; note = 2'-deoxy-2'-fluorocytidine-3'-phosphate
  modified_base 7: mod_base = OTHER; note = 2'-O-methyluridine-3'-phosphate
  modified_base 8: mod_base = OTHER; note = 2'-deoxy-2'-fluorouridine-3'-phosphate
  modified_base 9: mod_base = OTHER; note = 2'-deoxy-2'-fluorouridine-3'-phosphate
  modified_base 10: mod_base = OTHER; note = 2'-O-methyladenosine-3'-phosphate
  modified_base 11: mod_base = OTHER; note = 2'-O-methyluridine-3'-phosphate
  modified_base 12: mod_base = OTHER; note = 2'-O-methyluridine-3'-phosphate
  modified_base 13: mod_base = OTHER; note = 2'-O-methylguanosine-3'-phosphate
  modified_base 14: mod_base = OTHER; note = 2'-deoxy-2'-fluoroadenosine-3'-phosphate
  modified_base 15: mod_base = OTHER; note = 2'-O-methylguanosine-3'-phosphate
  modified_base 16: mod_base = OTHER; note = 2'-deoxy-2'-fluorouridine-3'-phosphate
  modified_base 17: mod_base = OTHER; note = 2'-O-methyluridine-3'-phosphate
  modified_base 18: mod_base = OTHER; note = 2'-O-methyluridine-3'-phosphate
  modified_base 19: mod_base = OTHER; note = 2'-O-methylcytidine-3'-phosphate
  modified_base 20: mod_base = OTHER; note = 2'-O-methyluridine-3'-phosphate
  modified_base 21: mod_base = OTHER; note = 2'-O-methylguanosine-3'-phosphorothioate
  modified_base 22: mod_base = OTHER; note = 2'-O-methyluridine-3'-phosphorothioate
  modified_base 23: mod_base = OTHER; note = 2'-O-methylguanosine
tagcactttattgagtttctgtg

SEQ ID NO: 2228 - RNA, 23 nt, synthetic construct
  source 1..23: mol_type = other RNA
  modified_base 1: mod_base = OTHER; note = 2'-O-methyluridine-3'-phosphorothioate 5'phosphate
  modified_base 2: mod_base = OTHER; note = 2'-deoxy-2'-fluoroadenosine-3'-phosphorothioate
  modified_base 3: mod_base = OTHER; note = 2'-O-methylguanosine-3'-phosphate
  modified_base 4: mod_base = OTHER; note = 2'-O-methylcytidine-3'-phosphate
  modified_base 5: mod_base = OTHER; note = 2'-O-methyladenosine-3'-phosphate
  modified_base 6: mod_base = OTHER; note = 2'-deoxy-2'-fluorocytidine-3'-phosphate
  modified_base 7: mod_base = OTHER; note = 2'-O-methyluridine-3'-phosphate
  modified_base 8: mod_base = OTHER; note = 2'-deoxy-2'-fluorouridine-3'-phosphate
  modified_base 9: mod_base = OTHER; note = 2'-deoxy-2'-fluorouridine-3'-phosphate
  modified_base 10: mod_base = OTHER; note = 2'-O-methyladenosine-3'-phosphate
  modified_base 11: mod_base = OTHER; note = 2'-O-methyluridine-3'-phosphate
  modified_base 12: mod_base = OTHER; note = 2'-O-methyluridine-3'-phosphate
  modified_base 13: mod_base = OTHER; note = 2'-O-methylguanosine-3'-phosphate
  modified_base 14: mod_base = OTHER; note = 2'-deoxy-2'-fluoroadenosine-3'-phosphate
  modified_base 15: mod_base = OTHER; note = 2'-O-methylguanosine-3'-phosphate
  modified_base 16: mod_base = OTHER; note = 2'-deoxy-2'-fluorouridine-3'-phosphate
  modified_base 17: mod_base = OTHER; note = 2'-O-methyluridine-3'-phosphate
  modified_base 18: mod_base = OTHER; note = 2'-O-methyluridine-3'-phosphate
  modified_base 19: mod_base = OTHER; note = 2'-O-methylcytidine-3'-phosphate
  modified_base 20: mod_base = OTHER; note = 2'-O-methyluridine-3'-phosphate
  modified_base 21: mod_base = OTHER; note = 2'-O-methylguanosine-3'-phosphorothioate
  modified_base 22: mod_base = OTHER; note = 2'-O-methyluridine-3'-phosphorothioate
  modified_base 23: mod_base = OTHER; note = 2'-O-methylguanosine
tagcactttattgagtttctgtg

SEQ ID NO: 2229 - RNA, 23 nt, synthetic construct
  source 1..23: mol_type = other RNA
  modified_base 1: mod_base = OTHER; note = 2'-O-methyluridine-3'-phosphorothioate
  modified_base 2: mod_base = OTHER; note = 2'-deoxy-2'-fluoroadenosine-3'-phosphorothioate
  modified_base 3: mod_base = OTHER; note = 2'-O-methyladenosine-3'-phosphate
  modified_base 4: mod_base = OTHER; note = 2'-O-methylguanosine-3'-phosphate
  modified_base 5: mod_base = OTHER; note = 2'-O-methylcytidine-3'-phosphate
  modified_base 6: mod_base = OTHER; note = 2'-deoxy-2'-fluoroadenosine-3'-phosphate
  modified_base 7: mod_base = OTHER; note = 2'-O-methylcytidine-3'-phosphate
  modified_base 8: mod_base = OTHER; note = 2'-deoxy-2'-fluorouridine-3'-phosphate
  modified_base 9: mod_base = OTHER; note = 2'-deoxy-2'-fluorouridine-3'-phosphate
  modified_base 10: mod_base = OTHER; note = 2'-O-methyluridine-3'-phosphate
  modified_base 11: mod_base = OTHER; note = 2'-O-methyladenosine-3'-phosphate
  modified_base 12: mod_base = OTHER; note = 2'-O-methyluridine-3'-phosphate
  modified_base 13: mod_base = OTHER; note = 2'-O-methyluridine-3'-phosphate
  modified_base 14: mod_base = OTHER; note = 2'-deoxy-2'-fluoroguanosine-3'-phosphate
  modified_base 15: mod_base = OTHER; note = 2'-O-methyladenosine-3'-phosphate
  modified_base 16: mod_base = OTHER; note = 2'-deoxy-2'-fluoroguanosine-3'-phosphate
  modified_base 17: mod_base = OTHER; note = 2'-O-methyluridine-3'-phosphate
  modified_base 18: mod_base = OTHER; note = 2'-O-methyluridine-3'-phosphate
  modified_base 19: mod_base = OTHER; note = 2'-O-methyluridine-3'-phosphate
  modified_base 20: mod_base = OTHER; note = 2'-O-methylcytidine-3'-phosphate
  modified_base 21: mod_base = OTHER; note = 2'-O-methyluridine-3'-phosphorothioate
  modified_base 22: mod_base = OTHER; note = 2'-O-methylguanosine-3'-phosphorothioate
  modified_base 23: mod_base = OTHER; note = 2'-O-methyluridine
taagcactttattgagtttctgt

SEQ ID NO: 2230 - RNA, 23 nt, synthetic construct
  source 1..23: mol_type = other RNA
  modified_base 1: mod_base = OTHER; note = 2'-O-methyluridine-3'-phosphorothioate 5'phosphate
  modified_base 2: mod_base = OTHER; note = 2'-deoxy-2'-fluoroadenosine-3'-phosphorothioate
  modified_base 3: mod_base = OTHER; note = 2'-O-methyladenosine-3'-phosphate
  modified_base 4: mod_base = OTHER; note = 2'-O-methylguanosine-3'-phosphate
  modified_base 5: mod_base = OTHER; note = 2'-O-methylcytidine-3'-phosphate
  modified_base 6: mod_base = OTHER; note = 2'-deoxy-2'-fluoroadenosine-3'-phosphate
  modified_base 7: mod_base = OTHER; note = 2'-O-methylcytidine-3'-phosphate
  modified_base 8: mod_base = OTHER; note = 2'-deoxy-2'-fluorouridine-3'-phosphate
  modified_base 9: mod_base = OTHER; note = 2'-deoxy-2'-fluorouridine-3'-phosphate
  modified_base 10: mod_base = OTHER; note = 2'-O-methyluridine-3'-phosphate
  modified_base 11: mod_base = OTHER; note = 2'-O-methyladenosine-3'-phosphate
  modified_base 12: mod_base = OTHER; note = 2'-O-methyluridine-3'-phosphate
  modified_base 13: mod_base = OTHER; note = 2'-O-methyluridine-3'-phosphate
  modified_base 14: mod_base = OTHER; note = 2'-deoxy-2'-fluoroguanosine-3'-phosphate
  modified_base 15: mod_base = OTHER; note = 2'-O-methyladenosine-3'-phosphate
  modified_base 16: mod_base = OTHER; note = 2'-deoxy-2'-fluoroguanosine-3'-phosphate
  modified_base 17: mod_base = OTHER; note = 2'-O-methyluridine-3'-phosphate
  modified_base 18: mod_base = OTHER; note = 2'-O-methyluridine-3'-phosphate
  modified_base 19: mod_base = OTHER; note = 2'-O-methyluridine-3'-phosphate
  modified_base 20: mod_base = OTHER; note = 2'-O-methylcytidine-3'-phosphate
  modified_base 21: mod_base = OTHER; note = 2'-O-methyluridine-3'-phosphorothioate
  modified_base 22: mod_base = OTHER; note = 2'-O-methylguanosine-3'-phosphorothioate
  modified_base 23: mod_base = OTHER; note = 2'-O-methyluridine
taagcactttattgagtttctgt

SEQ ID NO: 2231 - RNA, 23 nt, synthetic construct
  source 1..23: mol_type = other RNA
  modified_base 1: mod_base = OTHER; note = 2'-O-methyluridine-3'-phosphorothioate
  modified_base 2: mod_base = OTHER; note = 2'-deoxy-2'-fluoroadenosine-3'-phosphorothioate
  modified_base 3: mod_base = OTHER; note = 2'-O-methyladenosine-3'-phosphate
  modified_base 4: mod_base = OTHER; note = 2'-O-methyladenosine-3'-phosphate
  modified_base 5: mod_base = OTHER; note = 2'-O-methylguanosine-3'-phosphate
  modified_base 6: mod_base = OTHER; note = 2'-deoxy-2'-fluorocytidine-3'-phosphate
  modified_base 7: mod_base = OTHER; note = 2'-O-methyladenosine-3'-phosphate
  modified_base 8: mod_base = OTHER; note = 2'-deoxy-2'-fluorocytidine-3'-phosphate
  modified_base 9: mod_base = OTHER; note = 2'-deoxy-2'-fluorouridine-3'-phosphate
  modified_base 10: mod_base = OTHER; note = 2'-O-methyluridine-3'-phosphate
  modified_base 11: mod_base = OTHER; note = 2'-O-methyluridine-3'-phosphate
  modified_base 12: mod_base = OTHER; note = 2'-O-methyladenosine-3'-phosphate
  modified_base 13: mod_base = OTHER; note = 2'-O-methyluridine-3'-phosphate
  modified_base 14: mod_base = OTHER; note = 2'-deoxy-2'-fluorouridine-3'-phosphate
  modified_base 15: mod_base = OTHER; note = 2'-O-methylguanosine-3'-phosphate
  modified_base 16: mod_base = OTHER; note = 2'-deoxy-2'-fluoroadenosine-3'-phosphate
  modified_base 17: mod_base = OTHER; note = 2'-O-methylguanosine-3'-phosphate
  modified_base 18: mod_base = OTHER; note = 2'-O-methyluridine-3'-phosphate
  modified_base 19: mod_base = OTHER; note = 2'-O-methyluridine-3'-phosphate
  modified_base 20: mod_base = OTHER; note = 2'-O-methyluridine-3'-phosphate
  modified_base 21: mod_base = OTHER; note = 2'-O-methylcytidine-3'-phosphorothioate
  modified_base 22: mod_base = OTHER; note = 2'-O-methyluridine-3'-phosphorothioate
  modified_base 23: mod_base = OTHER; note = 2'-O-methylguanosine
taaagcactttattgagtttctg

SEQ ID NO: 2232 - RNA, 23 nt, synthetic construct
  source 1..23: mol_type = other RNA
  modified_base 1: mod_base = OTHER; note = 2'-O-methyluridine-3'-phosphorothioate 5'phosphate
  modified_base 2: mod_base = OTHER; note = 2'-deoxy-2'-fluoroadenosine-3'-phosphorothioate
  modified_base 3: mod_base = OTHER; note = 2'-O-methyladenosine-3'-phosphate
  modified_base 4: mod_base = OTHER; note = 2'-O-methyladenosine-3'-phosphate
  modified_base 5: mod_base = OTHER; note = 2'-O-methylguanosine-3'-phosphate
  modified_base 6: mod_base = OTHER; note = 2'-deoxy-2'-fluorocytidine-3'-phosphate
  modified_base 7: mod_base = OTHER; note = 2'-O-methyladenosine-3'-phosphate
  modified_base 8: mod_base = OTHER; note = 2'-deoxy-2'-fluorocytidine-3'-phosphate
  modified_base 9: mod_base = OTHER; note = 2'-deoxy-2'-fluorouridine-3'-phosphate
  modified_base 10: mod_base = OTHER; note = 2'-O-methyluridine-3'-phosphate
  modified_base 11: mod_base = OTHER; note = 2'-O-methyluridine-3'-phosphate
  modified_base 12: mod_base = OTHER; note = 2'-O-methyladenosine-3'-phosphate
  modified_base 13: mod_base = OTHER; note = 2'-O-methyluridine-3'-phosphate
  modified_base 14: mod_base = OTHER; note = 2'-deoxy-2'-fluorouridine-3'-phosphate
  modified_base 15: mod_base = OTHER; note = 2'-O-methylguanosine-3'-phosphate
  modified_base 16: mod_base = OTHER; note = 2'-deoxy-2'-fluoroadenosine-3'-phosphate
  modified_base 17: mod_base = OTHER; note = 2'-O-methylguanosine-3'-phosphate
  modified_base 18: mod_base = OTHER; note = 2'-O-methyluridine-3'-phosphate
  modified_base 19: mod_base = OTHER; note = 2'-O-methyluridine-3'-phosphate
  modified_base 20: mod_base = OTHER; note = 2'-O-methyluridine-3'-phosphate
  modified_base 21: mod_base = OTHER; note = 2'-O-methylcytidine-3'-phosphorothioate
  modified_base 22: mod_base = OTHER; note = 2'-O-methyluridine-3'-phosphorothioate
  modified_base 23: mod_base = OTHER; note = 2'-O-methylguanosine
taaagcactttattgagtttctg

SEQ ID NO: 2233 - RNA, 23 nt, synthetic construct
  source 1..23: mol_type = other RNA
  modified_base 1: mod_base = OTHER; note = 2'-O-methyluridine-3'-phosphorothioate
  modified_base 2: mod_base = OTHER; note = 2'-deoxy-2'-fluorocytidine-3'-phosphorothioate
  modified_base 3: mod_base = OTHER; note = 2'-O-methyladenosine-3'-phosphate
  modified_base 4: mod_base = OTHER; note = 2'-O-methyladenosine-3'-phosphate
  modified_base 5: mod_base = OTHER; note = 2'-O-methyladenosine-3'-phosphate
  modified_base 6: mod_base = OTHER; note = 2'-deoxy-2'-fluoroguanosine-3'-phosphate
  modified_base 7: mod_base = OTHER; note = 2'-O-methylcytidine-3'-phosphate
  modified_base 8: mod_base = OTHER; note = 2'-deoxy-2'-fluoroadenosine-3'-phosphate
  modified_base 9: mod_base = OTHER; note = 2'-deoxy-2'-fluorocytidine-3'-phosphate
  modified_base 10: mod_base = OTHER; note = 2'-O-methyluridine-3'-phosphate
  modified_base 11: mod_base = OTHER; note = 2'-O-methyluridine-3'-phosphate
  modified_base 12: mod_base = OTHER; note = 2'-O-methyluridine-3'-phosphate
  modified_base 13: mod_base = OTHER; note = 2'-O-methyladenosine-3'-phosphate
  modified_base 14: mod_base = OTHER; note = 2'-deoxy-2'-fluorouridine-3'-phosphate
  modified_base 15: mod_base = OTHER; note = 2'-O-methyluridine-3'-phosphate
  modified_base 16: mod_base = OTHER; note = 2'-deoxy-2'-fluoroguanosine-3'-phosphate
  modified_base 17: mod_base = OTHER; note = 2'-O-methyladenosine-3'-phosphate
  modified_base 18: mod_base = OTHER; note = 2'-O-methylguanosine-3'-phosphate
  modified_base 19: mod_base = OTHER; note = 2'-O-methyluridine-3'-phosphate
  modified_base 20: mod_base = OTHER; note = 2'-O-methyluridine-3'-phosphate
  modified_base 21: mod_base = OTHER; note = 2'-O-methyluridine-3'-phosphorothioate
  modified_base 22: mod_base = OTHER; note = 2'-O-methylcytidine-3'-phosphorothioate
  modified_base 23: mod_base = OTHER; note = 2'-O-methyluridine
tcaaagcactttattgagtttct

SEQ ID NO: 2234 - RNA, 23 nt, synthetic construct
  source 1..23: mol_type = other RNA
  modified_base 1: mod_base = OTHER; note = 2'-O-methyluridine-3'-phosphorothioate 5'phosphate
  modified_base 2: mod_base = OTHER; note = 2'-deoxy-2'-fluorocytidine-3'-phosphorothioate
  modified_base 3: mod_base = OTHER; note = 2'-O-methyladenosine-3'-phosphate
  modified_base 4: mod_base = OTHER; note = 2'-O-methyladenosine-3'-phosphate
  modified_base 5: mod_base = OTHER; note = 2'-O-methyladenosine-3'-phosphate
  modified_base 6: mod_base = OTHER; note = 2'-deoxy-2'-fluoroguanosine-3'-phosphate
  modified_base 7: mod_base = OTHER; note = 2'-O-methylcytidine-3'-phosphate
  modified_base 8: mod_base = OTHER; note = 2'-deoxy-2'-fluoroadenosine-3'-phosphate
  modified_base 9: mod_base = OTHER; note = 2'-deoxy-2'-fluorocytidine-3'-phosphate
  modified_base 10: mod_base = OTHER; note = 2'-O-methyluridine-3'-phosphate
  modified_base 11: mod_base = OTHER; note = 2'-O-methyluridine-3'-phosphate
  modified_base 12: mod_base = OTHER; note = 2'-O-methyluridine-3'-phosphate
  modified_base 13: mod_base = OTHER; note = 2'-O-methyladenosine-3'-phosphate
  modified_base 14: mod_base = OTHER; note = 2'-deoxy-2'-fluorouridine-3'-phosphate
  modified_base 15: mod_base = OTHER; note = 2'-O-methyluridine-3'-phosphate
  modified_base 16: mod_base = OTHER; note = 2'-deoxy-2'-fluoroguanosine-3'-phosphate
  modified_base 17: mod_base = OTHER; note = 2'-O-methyladenosine-3'-phosphate
  modified_base 18: mod_base = OTHER; note = 2'-O-methylguanosine-3'-phosphate
  modified_base 19: mod_base = OTHER; note = 2'-O-methyluridine-3'-phosphate
  modified_base 20: mod_base = OTHER; note = 2'-O-methyluridine-3'-phosphate
  modified_base 21: mod_base = OTHER; note = 2'-O-methyluridine-3'-phosphorothioate
  modified_base 22: mod_base = OTHER; note = 2'-O-methylcytidine-3'-phosphorothioate
  modified_base 23: mod_base = OTHER; note = 2'-O-methyluridine
tcaaagcactttattgagtttct

SEQ ID NO: 2235 - RNA, 23 nt, synthetic construct
  source 1..23: mol_type = other RNA
  modified_base 1: mod_base = OTHER; note = 2'-O-methyluridine-3'-phosphorothioate
  modified_base 2: mod_base = OTHER; note = 2'-deoxy-2'-fluorouridine-3'-phosphorothioate
  modified_base 3: mod_base = OTHER; note = 2'-O-methyluridine-3'-phosphate
  modified_base 4: mod_base = OTHER; note = 2'-O-methylcytidine-3'-phosphate
  modified_base 5: mod_base = OTHER; note = 2'-O-methyladenosine-3'-phosphate
  modified_base 6: mod_base = OTHER; note = 2'-deoxy-2'-fluoroadenosine-3'-phosphate
  modified_base 7: mod_base = OTHER; note = 2'-O-methyladenosine-3'-phosphate
  modified_base 8: mod_base = OTHER; note = 2'-deoxy-2'-fluoroguanosine-3'-phosphate
  modified_base 9: mod_base = OTHER; note = 2'-deoxy-2'-fluorocytidine-3'-phosphate
  modified_base 10: mod_base = OTHER; note = 2'-O-methyladenosine-3'-phosphate
  modified_base 11: mod_base = OTHER; note = 2'-O-methylcytidine-3'-phosphate
  modified_base 12: mod_base = OTHER; note = 2'-O-methyluridine-3'-phosphate
  modified_base 13: mod_base = OTHER; note = 2'-O-methyluridine-3'-phosphate
  modified_base 14: mod_base = OTHER; note = 2'-deoxy-2'-fluorouridine-3'-phosphate
  modified_base 15: mod_base = OTHER; note = 2'-O-methyladenosine-3'-phosphate
  modified_base 16: mod_base = OTHER; note = 2'-deoxy-2'-fluorouridine-3'-phosphate
  modified_base 17: mod_base = OTHER; note = 2'-O-methyluridine-3'-phosphate
  modified_base 18: mod_base = OTHER; note = 2'-O-methylguanosine-3'-phosphate
  modified_base 19: mod_base = OTHER; note = 2'-O-methyladenosine-3'-phosphate
  modified_base 20: mod_base = OTHER; note = 2'-O-methylguanosine-3'-phosphate
  modified_base 21: mod_base = OTHER; note = 2'-O-methyluridine-3'-phosphorothioate
  modified_base 22: mod_base = OTHER; note = 2'-O-methyluridine-3'-phosphorothioate
  modified_base 23: mod_base = OTHER; note = 2'-O-methyluridine
tttcaaagcactttattgagttt

SEQ ID NO: 2236 - RNA, 23 nt, synthetic construct
  source 1..23: mol_type = other RNA
  modified_base 1: mod_base = OTHER; note = 2'-O-methyluridine-3'-phosphorothioate 5'phosphate
  modified_base 2: mod_base = OTHER; note = 2'-deoxy-2'-fluorouridine-3'-phosphorothioate
  modified_base 3: mod_base = OTHER; note = 2'-O-methyluridine-3'-phosphate
  modified_base 4: mod_base = OTHER; note = 2'-O-methylcytidine-3'-phosphate
  modified_base 5: mod_base = OTHER; note = 2'-O-methyladenosine-3'-phosphate
  modified_base 6: mod_base = OTHER; note = 2'-deoxy-2'-fluoroadenosine-3'-phosphate
  modified_base 7: mod_base = OTHER; note = 2'-O-methyladenosine-3'-phosphate
  modified_base 8: mod_base = OTHER; note = 2'-deoxy-2'-fluoroguanosine-3'-phosphate
  modified_base 9: mod_base = OTHER; note = 2'-deoxy-2'-fluorocytidine-3'-phosphate
  modified_base 10: mod_base = OTHER; note = 2'-O-methyladenosine-3'-phosphate
  modified_base 11: mod_base = OTHER; note = 2'-O-methylcytidine-3'-phosphate
  modified_base 12: mod_base = OTHER; note = 2'-O-methyluridine-3'-phosphate
  modified_base 13: mod_base = OTHER; note = 2'-O-methyluridine-3'-phosphate
  modified_base 14: mod_base = OTHER; note = 2'-deoxy-2'-fluorouridine-3'-phosphate
  modified_base 15: mod_base = OTHER; note = 2'-O-methyladenosine-3'-phosphate
  modified_base 16: mod_base = OTHER; note = 2'-deoxy-2'-fluorouridine-3'-phosphate
  modified_base 17: mod_base = OTHER; note = 2'-O-methyluridine-3'-phosphate
  modified_base 18: mod_base = OTHER; note = 2'-O-methylguanosine-3'-phosphate
  modified_base 19: mod_base = OTHER; note = 2'-O-methyladenosine-3'-phosphate
  modified_base 20: mod_base = OTHER; note = 2'-O-methylguanosine-3'-phosphate
  modified_base 21: mod_base = OTHER; note = 2'-O-methyluridine-3'-phosphorothioate
  modified_base 22: mod_base = OTHER; note = 2'-O-methyluridine-3'-phosphorothioate
  modified_base 23: mod_base = OTHER; note = 2'-O-methyluridine
tttcaaagcactttattgagttt

SEQ ID NO: 2237 - RNA, 23 nt, synthetic construct
  source 1..23: mol_type = other RNA
  modified_base 1: mod_base = OTHER; note = 2'-O-methyluridine-3'-phosphorothioate
  modified_base 2: mod_base = OTHER; note = 2'-deoxy-2'-fluorouridine-3'-phosphorothioate
  modified_base 3: mod_base = OTHER; note = 2'-O-methyluridine-3'-phosphate
  modified_base 4: mod_base = OTHER; note = 2'-O-methyluridine-3'-phosphate
  modified_base 5: mod_base = OTHER; note = 2'-O-methyluridine-3'-phosphate
  modified_base 6: mod_base = OTHER; note = 2'-deoxy-2'-fluorocytidine-3'-phosphate
  modified_base 7: mod_base = OTHER; note = 2'-O-methyladenosine-3'-phosphate
  modified_base 8: mod_base = OTHER; note = 2'-deoxy-2'-fluoroadenosine-3'-phosphate
  modified_base 9: mod_base = OTHER; note = 2'-deoxy-2'-fluoroadenosine-3'-phosphate
  modified_base 10: mod_base = OTHER; note = 2'-O-methylguanosine-3'-phosphate
  modified_base 11: mod_base = OTHER; note = 2'-O-methylcytidine-3'-phosphate
  modified_base 12: mod_base = OTHER; note = 2'-O-methyladenosine-3'-phosphate
  modified_base 13: mod_base = OTHER; note = 2'-O-methylcytidine-3'-phosphate
  modified_base 14: mod_base = OTHER; note = 2'-deoxy-2'-fluorouridine-3'-phosphate
  modified_base 15: mod_base = OTHER; note = 2'-O-methyluridine-3'-phosphate
  modified_base 16: mod_base = OTHER; note = 2'-deoxy-2'-fluorouridine-3'-phosphate
  modified_base 17: mod_base = OTHER; note = 2'-O-methyladenosine-3'-phosphate
  modified_base 18: mod_base = OTHER; note = 2'-O-methyluridine-3'-phosphate
  modified_base 19: mod_base = OTHER; note = 2'-O-methyluridine-3'-phosphate
  modified_base 20: mod_base = OTHER; note = 2'-O-methylguanosine-3'-phosphate
  modified_base 21: mod_base = OTHER; note = 2'-O-methyladenosine-3'-phosphorothioate
  modified_base 22: mod_base = OTHER; note = 2'-O-methylguanosine-3'-phosphorothioate
  modified_base 23: mod_base = OTHER; note = 2'-O-methyluridine
tttttcaaagcactttattgagt

SEQ ID NO: 2238 - RNA, 23 nt, synthetic construct
  source 1..23: mol_type = other RNA
  modified_base 1: mod_base = OTHER; note = 2'-O-methyluridine-3'-phosphorothioate 5'phosphate
  modified_base 2: mod_base = OTHER; note = 2'-deoxy-2'-fluorouridine-3'-phosphorothioate
  modified_base 3: mod_base = OTHER; note = 2'-O-methyluridine-3'-phosphate
  modified_base 4: mod_base = OTHER; note = 2'-O-methyluridine-3'-phosphate
  modified_base 5: mod_base = OTHER; note = 2'-O-methyluridine-3'-phosphate
  modified_base 6: mod_base = OTHER; note = 2'-deoxy-2'-fluorocytidine-3'-phosphate
  modified_base 7: mod_base = OTHER; note = 2'-O-methyladenosine-3'-phosphate
  modified_base 8: mod_base = OTHER; note = 2'-deoxy-2'-fluoroadenosine-3'-phosphate
  modified_base 9: mod_base = OTHER; note = 2'-deoxy-2'-fluoroadenosine-3'-phosphate
  modified_base 10: mod_base = OTHER; note = 2'-O-methylguanosine-3'-phosphate
  modified_base 11: mod_base = OTHER; note = 2'-O-methylcytidine-3'-phosphate
  modified_base 12: mod_base = OTHER; note = 2'-O-methyladenosine-3'-phosphate
  modified_base 13: mod_base = OTHER; note = 2'-O-methylcytidine-3'-phosphate
  modified_base 14: mod_base = OTHER; note = 2'-deoxy-2'-fluorouridine-3'-phosphate
  modified_base 15: mod_base = OTHER; note = 2'-O-methyluridine-3'-phosphate
  modified_base 16: mod_base = OTHER; note = 2'-deoxy-2'-fluorouridine-3'-phosphate
  modified_base 17: mod_base = OTHER; note = 2'-O-methyladenosine-3'-phosphate
  modified_base 18: mod_base = OTHER; note = 2'-O-methyluridine-3'-phosphate
  modified_base 19: mod_base = OTHER; note = 2'-O-methyluridine-3'-phosphate
  modified_base 20: mod_base = OTHER; note = 2'-O-methylguanosine-3'-phosphate
  modified_base 21: mod_base = OTHER; note = 2'-O-methyladenosine-3'-phosphorothioate
  modified_base 22: mod_base = OTHER; note = 2'-O-methylguanosine-3'-phosphorothioate
  modified_base 23: mod_base = OTHER; note = 2'-O-methyluridine
tttttcaaagcactttattgagt

SEQ ID NO: 2239 - RNA, 23 nt, synthetic construct
  source 1..23: mol_type = other RNA
  modified_base 1: mod_base = OTHER; note = 2'-O-methyluridine-3'-phosphorothioate 5'phosphate
  modified_base 2: mod_base = OTHER; note = 2'-deoxy-2'-fluorouridine-3'-phosphorothioate
  modified_base 3: mod_base = OTHER; note = 2'-O-methylcytidine-3'-phosphate
  modified_base 4: mod_base = OTHER; note = 2'-O-methyladenosine-3'-phosphate
  modified_base 5: mod_base = OTHER; note = 2'-O-methyladenosine-3'-phosphate
  modified_base 6: mod_base = OTHER; note = 2'-deoxy-2'-fluoroadenosine-3'-phosphate
  modified_base 7: mod_base = OTHER; note = 2'-O-methylguanosine-3'-phosphate
  modified_base 8: mod_base = OTHER; note = 2'-deoxy-2'-fluorocytidine-3'-phosphate
  modified_base 9: mod_base = OTHER; note = 2'-deoxy-2'-fluoroadenosine-3'-phosphate
  modified_base 10: mod_base = OTHER; note = 2'-O-methylcytidine-3'-phosphate
  modified_base 11: mod_base = OTHER; note = 2'-O-methyluridine-3'-phosphate
  modified_base 12: mod_base = OTHER; note = 2'-O-methyluridine-3'-phosphate
  modified_base 13: mod_base = OTHER; note = 2'-O-methyluridine-3'-phosphate
  modified_base 14: mod_base = OTHER; note = 2'-deoxy-2'-fluoroadenosine-3'-phosphate
  modified_base 15: mod_base = OTHER; note = 2'-O-methyluridine-3'-phosphate
  modified_base 16: mod_base = OTHER; note = 2'-deoxy-2'-fluorouridine-3'-phosphate
  modified_base 17: mod_base = OTHER; note = 2'-O-methylguanosine-3'-phosphate
  modified_base 18: mod_base = OTHER; note = 2'-O-methyladenosine-3'-phosphate
  modified_base 19: mod_base = OTHER; note = 2'-O-methylguanosine-3'-phosphate
  modified_base 20: mod_base = OTHER; note = 2'-O-methyluridine-3'-phosphate
  modified_base 21: mod_base = OTHER; note = 2'-O-methyluridine-3'-phosphorothioate
  modified_base 22: mod_base = OTHER; note = 2'-O-methyluridine-3'-phosphorothioate
  modified_base 23: mod_base = OTHER; note = 2'-O-methylcytidine
ttcaaagcactttattgagtttc

SEQ ID NO: 2240 - RNA, 23 nt, synthetic construct
  source 1..23: mol_type = other RNA
ttggagcccaagaaagtgaaaga

SEQ ID NO: 2241 - RNA, 23 nt, synthetic construct
  source 1..23: mol_type = other RNA
ttggagcccaagaaagtgaaaga

SEQ ID NO: 2242 - RNA, 23 nt, synthetic construct
  source 1..23: mol_type = other RNA
tggagcccaagaaagtgaaagac

SEQ ID NO: 2243 - RNA, 23 nt, synthetic construct
  source 1..23: mol_type = other RNA
tggagcccaagaaagtgaaagac

SEQ ID NO: 2244 - RNA, 23 nt, synthetic construct
  source 1..23: mol_type = other RNA
gagcccaagaaagtgaaagacca

SEQ ID NO: 2245 - RNA, 23 nt, synthetic construct
  source 1..23: mol_type = other RNA
gagcccaagaaagtgaaagacca

SEQ ID NO: 2246 - RNA, 23 nt, synthetic construct
  source 1..23: mol_type = other RNA
agcccaagaaagtgaaagaccat

SEQ ID NO: 2247 - RNA, 23 nt, synthetic construct
  source 1..23: mol_type = other RNA
agcccaagaaagtgaaagaccat

SEQ ID NO: 2248 - RNA, 23 nt, synthetic construct
  source 1..23: mol_type = other RNA
agaaagagaaatgctttgagcct

SEQ ID NO: 2249 - RNA, 23 nt, synthetic construct
  source 1..23: mol_type = other RNA
agaaagagaaatgctttgagcct

SEQ ID NO: 2250 - RNA, 23 nt, synthetic construct
  source 1..23: mol_type = other RNA
gaaagagaaatgctttgagcctc

SEQ ID NO: 2251 - RNA, 23 nt, synthetic construct
  source 1..23: mol_type = other RNA
gaaagagaaatgctttgagcctc

SEQ ID NO: 2252 - RNA, 23 nt, synthetic construct
  source 1..23: mol_type = other RNA
aaagagaaatgctttgagcctca

SEQ ID NO: 2253 - RNA, 23 nt, synthetic construct
  source 1..23: mol_type = other RNA
aaagagaaatgctttgagcctca

SEQ ID NO: 2254 - RNA, 23 nt, synthetic construct
  source 1..23: mol_type = other RNA
aagagaaatgctttgagcctcag

SEQ ID NO: 2255 - RNA, 23 nt, synthetic construct
  source 1..23: mol_type = other RNA
aagagaaatgctttgagcctcag

SEQ ID NO: 2256 - RNA, 23 nt, synthetic construct
  source 1..23: mol_type = other RNA
agagaaatgctttgagcctcagc

SEQ ID NO: 2257 - RNA, 23 nt, synthetic construct
  source 1..23: mol_type = other RNA
agagaaatgctttgagcctcagc

SEQ ID NO: 2258 - RNA, 23 nt, synthetic construct
  source 1..23: mol_type = other RNA
agaaatgctttgagcctcagctt

SEQ ID NO: 2259 - RNA, 23 nt, synthetic construct
  source 1..23: mol_type = other RNA
agaaatgctttgagcctcagctt

SEQ ID NO: 2260 - RNA, 23 nt, synthetic construct
  source 1..23: mol_type = other RNA
aaatgctttgagcctcagcttct

SEQ ID NO: 2261 - RNA, 23 nt, synthetic construct
  source 1..23: mol_type = other RNA
aaatgctttgagcctcagcttct

SEQ ID NO: 2262 - RNA, 23 nt, synthetic construct
  source 1..23: mol_type = other RNA
aatgctttgagcctcagcttctc

SEQ ID NO: 2263 - RNA, 23 nt, synthetic construct
  source 1..23: mol_type = other RNA
aatgctttgagcctcagcttctc

SEQ ID NO: 2264 - RNA, 23 nt, synthetic construct
  source 1..23: mol_type = other RNA
atgctttgagcctcagcttctca

SEQ ID NO: 2265 - RNA, 23 nt, synthetic construct
  source 1..23: mol_type = other RNA
atgctttgagcctcagcttctca

SEQ ID NO: 2266 - RNA, 23 nt, synthetic construct
  source 1..23: mol_type = other RNA
atactccaccttcctgcaggagg

SEQ ID NO: 2267 - RNA, 23 nt, synthetic construct
  source 1..23: mol_type = other RNA
atactccaccttcctgcaggagg

SEQ ID NO: 2268 - RNA, 23 nt, synthetic construct
  source 1..23: mol_type = other RNA
ggcacagaaactcaataaagtgc

SEQ ID NO: 2269 - RNA, 23 nt, synthetic construct
  source 1..23: mol_type = other RNA
ggcacagaaactcaataaagtgc

SEQ ID NO: 2270 - RNA, 23 nt, synthetic construct
  source 1..23: mol_type = other RNA
gcacagaaactcaataaagtgct

SEQ ID NO: 2271 - RNA, 23 nt, synthetic construct
  source 1..23: mol_type = other RNA
gcacagaaactcaataaagtgct

SEQ ID NO: 2272 - RNA, 23 nt, synthetic construct
  source 1..23: mol_type = other RNA
cacagaaactcaataaagtgctt

SEQ ID NO: 2273 - RNA, 23 nt, synthetic construct
  source 1..23: mol_type = other RNA
cacagaaactcaataaagtgctt

SEQ ID NO: 2274 - RNA, 23 nt, synthetic construct
  source 1..23: mol_type = other RNA
acagaaactcaataaagtgcttt

SEQ ID NO: 2275 - RNA, 23 nt, synthetic construct
  source 1..23: mol_type = other RNA
acagaaactcaataaagtgcttt

SEQ ID NO: 2276 - RNA, 23 nt, synthetic construct
  source 1..23: mol_type = other RNA
cagaaactcaataaagtgctttg

SEQ ID NO: 2277 - RNA, 23 nt, synthetic construct
  source 1..23: mol_type = other RNA
cagaaactcaataaagtgctttg

SEQ ID NO: 2278 - RNA, 23 nt, synthetic construct
  source 1..23: mol_type = other RNA
agaaactcaataaagtgctttga

SEQ ID NO: 2279 - RNA, 23 nt, synthetic construct
  source 1..23: mol_type = other RNA
agaaactcaataaagtgctttga

SEQ ID NO: 2280 - RNA, 23 nt, synthetic construct
  source 1..23: mol_type = other RNA
aaactcaataaagtgctttgaaa

SEQ ID NO: 2281 - RNA, 23 nt, synthetic construct
  source 1..23: mol_type = other RNA
aaactcaataaagtgctttgaaa

SEQ ID NO: 2282 - RNA, 23 nt, synthetic construct
  source 1..23: mol_type = other RNA
actcaataaagtgctttgaaaac

SEQ ID NO: 2283 - RNA, 23 nt, synthetic construct
  source 1..23: mol_type = other RNA
actcaataaagtgctttgaaaac

SEQ ID NO: 2284 - RNA, 23 nt, synthetic construct
  source 1..23: mol_type = other RNA
  modified_base 1: mod_base = OTHER; note = 2'-O-methylguanosine-3'-phosphate
  modified_base 2: mod_base = OTHER; note = 2'-O-methyladenosine-3'-phosphate
  modified_base 3: mod_base = OTHER; note = 2'-O-methyladenosine-3'-phosphate
  modified_base 4: mod_base = OTHER; note = 2'-O-methyladenosine-3'-phosphate
  modified_base 5: mod_base = OTHER; note = 2'-O-methylcytidine-3'-phosphate
  modified_base 6: mod_base = OTHER; note = 2'-O-methyluridine-3'-phosphate
  modified_base 7: mod_base = OTHER; note = 2'-O-methylcytidine-3'-phosphate
  modified_base 8: mod_base = OTHER; note = 2'-O-methyladenosine-3'-phosphate
  modified_base 9: mod_base = OTHER; note = 2'-O-methyladenosine-3'-phosphate
  modified_base 10: mod_base = OTHER; note = 2'-O-methyluridine-3'-phosphate
  modified_base 11: mod_base = OTHER; note = 2'-O-methyladenosine-3'-phosphate
  modified_base 12: mod_base = OTHER; note = 2'-O-methyladenosine-3'-phosphate
  modified_base 13: mod_base = OTHER; note = 2'-O-methyladenosine-3'-phosphate
  modified_base 14: mod_base = OTHER; note = 2'-O-methylguanosine-3'-phosphate
  modified_base 15: mod_base = OTHER; note = 2'-O-methyluridine-3'-phosphate
  modified_base 16: mod_base = OTHER; note = 2'-O-methylguanosine-3'-phosphate
  modified_base 17: mod_base = OTHER; note = 2'-O-methylcytidine-3'-phosphate
  modified_base 18: mod_base = OTHER; note = 2'-O-methyluridine-3'-phosphate
  modified_base 19: mod_base = OTHER; note = 2'-O-methyluridine-3'-phosphate
  modified_base 20: mod_base = OTHER; note = 2'-O-methyluridine-3'-phosphate
  modified_base 21: mod_base = OTHER; note = 2'-O-methylguanosine-3'-phosphate
  modified_base 22: mod_base = OTHER; note = 2'-O-methyladenosine-3'-phosphate
  modified_base 23: mod_base = OTHER; note = 2'-O-methyladenosine
gaaactcaataaagtgctttgaa

SEQ ID NO: 2285-2332 - skipped (48 entries)

SEQ ID NO: 2333 - RNA, 21 nt, synthetic construct
  source 1..21: mol_type = other RNA
aataaagtgctttgaaaacga

SEQ ID NO: 2334 - RNA, 21 nt, synthetic construct
  source 1..21: mol_type = other RNA
aataaagtgctttgaaaacga

SEQ ID NO: 2335 - RNA, 23 nt, synthetic construct
  source 1..23: mol_type = other RNA
tcgttttcaaagcactttattga

SEQ ID NO: 2336 - RNA, 23 nt, synthetic construct
  source 1..23: mol_type = other RNA
tcgttttcaaagcactttattga

SEQ ID NO: 2337 - RNA, 21 nt, synthetic construct
  source 1..21: mol_type = other RNA
  modified_base 1: mod_base = OTHER; note = 2'-O-methyladenosine-3'-phosphorothioate
  modified_base 2: mod_base = OTHER; note = 2'-O-methyladenosine-3'-phosphorothioate
  modified_base 3: mod_base = OTHER; note = 2'-O-methyluridine-3'-phosphate
  modified_base 4: mod_base = OTHER; note = 2'-O-methyladenosine-3'-phosphate
  modified_base 5: mod_base = OTHER; note = 2'-O-methyladenosine-3'-phosphate
  modified_base 6: mod_base = OTHER; note = 2'-O-methyladenosine-3'-phosphate
  modified_base 7: mod_base = OTHER; note = 2'-deoxy-2'-fluoroguanosine-3'-phosphate
  modified_base 8: mod_base = OTHER; note = 2'-O-methyluridine-3'-phosphate
  modified_base 9: mod_base = OTHER; note = 2'-deoxy-2'-fluoroguanosine-3'-phosphate
  modified_base 10: mod_base = OTHER; note = 2'-deoxy-2'-fluorocytidine-3'-phosphate
  modified_base 11: mod_base = OTHER; note = 2'-deoxy-2'-fluorouridine-3'-phosphate
  modified_base 12: mod_base = OTHER; note = 2'-O-methyluridine-3'-phosphate
  modified_base 13: mod_base = OTHER; note = 2'-O-methyluridine-3'-phosphate
  modified_base 14: mod_base = OTHER; note = 2'-O-methylguanosine-3'-phosphate
  modified_base 15: mod_base = OTHER; note = 2'-O-methyladenosine-3'-phosphate
  modified_base 16: mod_base = OTHER; note = 2'-O-methyladenosine-3'-phosphate
  modified_base 17: mod_base = OTHER; note = 2'-O-methyladenosine-3'-phosphate
  modified_base 18: mod_base = OTHER; note = 2'-O-methyladenosine-3'-phosphate
  modified_base 19: mod_base = OTHER; note = 2'-O-methylcytidine-3'-phosphate
  modified_base 20: mod_base = OTHER; note = 2'-O-methylguanosine-3'-phosphate
  modified_base 21: mod_base = OTHER; note = 2'-O-methyladenosine-3'-phosphate ((2S,4R)-1-[29-[[2-(acetylamino)-2-deoxy-beta-D-galactopyra nosyl]oxy]-14,14-bis[[3-[[3-[[5-[[2-(acetylamino)-2-deoxy-b eta-D-galactopyranosyl]oxy]-1-oxopentyl]amino]propyl]amino] -3-oxopropoxy]methyl]-1,12,19,25-tetraoxo-16-oxa-13,20,24-t riazanonacos-1-yl]-4-hydroxy-2-pyrrolidinyl)methyl ester
aataaagtgctttgaaaacga

SEQ ID NO: 2338 - RNA, 21 nt, synthetic construct
  source 1..21: mol_type = other RNA
  modified_base 1: mod_base = OTHER; note = 2'-O-methyladenosine-3'-phosphorothioate
  modified_base 2: mod_base = OTHER; note = 2'-O-methyladenosine-3'-phosphorothioate
  modified_base 3: mod_base = OTHER; note = 2'-O-methyluridine-3'-phosphate
  modified_base 4: mod_base = OTHER; note = 2'-O-methyladenosine-3'-phosphate
  modified_base 5: mod_base = OTHER; note = 2'-O-methyladenosine-3'-phosphate
  modified_base 6: mod_base = OTHER; note = 2'-O-methyladenosine-3'-phosphate
  modified_base 7: mod_base = OTHER; note = 2'-deoxy-2'-fluoroguanosine-3'-phosphate
  modified_base 8: mod_base = OTHER; note = 2'-O-methyluridine-3'-phosphate
  modified_base 9: mod_base = OTHER; note = 2'-deoxy-2'-fluoroguanosine-3'-phosphate
  modified_base 10: mod_base = OTHER; note = 2'-deoxy-2'-fluorocytidine-3'-phosphate
  modified_base 11: mod_base = OTHER; note = 2'-deoxy-2'-fluorouridine-3'-phosphate
  modified_base 12: mod_base = OTHER; note = 2'-O-methyluridine-3'-phosphate
  modified_base 13: mod_base = OTHER; note = 2'-O-methyluridine-3'-phosphate
  modified_base 14: mod_base = OTHER; note = 2'-O-methylguanosine-3'-phosphate
  modified_base 15: mod_base = OTHER; note = 2'-O-methyladenosine-3'-phosphate
  modified_base 16: mod_base = OTHER; note = 2'-O-methyladenosine-3'-phosphate
  modified_base 17: mod_base = OTHER; note = 2'-O-methyladenosine-3'-phosphate
  modified_base 18: mod_base = OTHER; note = 2'-O-methyladenosine-3'-phosphate
  modified_base 19: mod_base = OTHER; note = 2'-O-methylcytidine-3'-phosphate
  modified_base 20: mod_base = OTHER; note = 2'-O-methylguanosine-3'-phosphate
  modified_base 21: mod_base = OTHER; note = 2'-O-methyladenosine-3'-phosphate ((2S,4R)-1-[29-[[2-(acetylamino)-2-deoxy-beta-D-galactopyra nosyl]oxy]-14,14-bis[[3-[[3-[[5-[[2-(acetylamino)-2-deoxy-b eta-D-galactopyranosyl]oxy]-1-oxopentyl]amino]propyl]amino] -3-oxopropoxy]methyl]-1,12,19,25-tetraoxo-16-oxa-13,20,24-t riazanonacos-1-yl]-4-hydroxy-2-pyrrolidinyl)methyl ester
aataaagtgctttgaaaacga

SEQ ID NO: 2339 - RNA, 23 nt, synthetic construct
  source 1..23: mol_type = other RNA
  modified_base 1: mod_base = OTHER; note = 2'-O-methyluridine-3'-phosphorothioate
  modified_base 2: mod_base = OTHER; note = 2'-deoxy-2'-fluorocytidine-3'-phosphorothioate
  modified_base 3: mod_base = OTHER; note = 2'-O-methylguanosine-3'-phosphate
  modified_base 4: mod_base = OTHER; note = 2'-O-methyluridine-3'-phosphate
  modified_base 5: mod_base = OTHER; note = 2'-O-methyluridine-3'-phosphate
  modified_base 6: mod_base = OTHER; note = 2'-deoxy-2'-fluorouridine-3'-phosphate
  modified_base 7: mod_base = OTHER; note = 2'-O-methyluridine-3'-phosphate
  modified_base 8: mod_base = OTHER; note = 2'-deoxy-2'-fluorocytidine-3'-phosphate
  modified_base 9: mod_base = OTHER; note = 2'-deoxy-2'-fluoroadenosine-3'-phosphate
  modified_base 10: mod_base = OTHER; note = 2'-O-methyladenosine-3'-phosphate
  modified_base 11: mod_base = OTHER; note = 2'-O-methyladenosine-3'-phosphate
  modified_base 12: mod_base = OTHER; note = 2'-O-methylguanosine-3'-phosphate
  modified_base 13: mod_base = OTHER; note = 2'-O-methylcytidine-3'-phosphate
  modified_base 14: mod_base = OTHER; note = 2'-deoxy-2'-fluoroadenosine-3'-phosphate
  modified_base 15: mod_base = OTHER; note = 2'-O-methylcytidine-3'-phosphate
  modified_base 16: mod_base = OTHER; note = 2'-deoxy-2'-fluorouridine-3'-phosphate
  modified_base 17: mod_base = OTHER; note = 2'-O-methyluridine-3'-phosphate
  modified_base 18: mod_base = OTHER; note = 2'-O-methyluridine-3'-phosphate
  modified_base 19: mod_base = OTHER; note = 2'-O-methyladenosine-3'-phosphate
  modified_base 20: mod_base = OTHER; note = 2'-O-methyluridine-3'-phosphate
  modified_base 21: mod_base = OTHER; note = 2'-O-methyluridine-3'-phosphorothioate
  modified_base 22: mod_base = OTHER; note = 2'-O-methylguanosine-3'-phosphorothioate
  modified_base 23: mod_base = OTHER; note = 2'-O-methyladenosine
tcgttttcaaagcactttattga

SEQ ID NO: 2340 - RNA, 23 nt, synthetic construct
  source 1..23: mol_type = other RNA
  modified_base 1: mod_base = OTHER; note = 2'-O-methyluridine-3'-phosphorothioate 5'phosphate
  modified_base 2: mod_base = OTHER; note = 2'-deoxy-2'-fluorocytidine-3'-phosphorothioate
  modified_base 3: mod_base = OTHER; note = 2'-O-methylguanosine-3'-phosphate
  modified_base 4: mod_base = OTHER; note = 2'-O-methyluridine-3'-phosphate
  modified_base 5: mod_base = OTHER; note = 2'-O-methyluridine-3'-phosphate
  modified_base 6: mod_base = OTHER; note = 2'-deoxy-2'-fluorouridine-3'-phosphate
  modified_base 7: mod_base = OTHER; note = 2'-O-methyluridine-3'-phosphate
  modified_base 8: mod_base = OTHER; note = 2'-deoxy-2'-fluorocytidine-3'-phosphate
  modified_base 9: mod_base = OTHER; note = 2'-deoxy-2'-fluoroadenosine-3'-phosphate
  modified_base 10: mod_base = OTHER; note = 2'-O-methyladenosine-3'-phosphate
  modified_base 11: mod_base = OTHER; note = 2'-O-methyladenosine-3'-phosphate
  modified_base 12: mod_base = OTHER; note = 2'-O-methylguanosine-3'-phosphate
  modified_base 13: mod_base = OTHER; note = 2'-O-methylcytidine-3'-phosphate
  modified_base 14: mod_base = OTHER; note = 2'-deoxy-2'-fluoroadenosine-3'-phosphate
  modified_base 15: mod_base = OTHER; note = 2'-O-methylcytidine-3'-phosphate
  modified_base 16: mod_base = OTHER; note = 2'-deoxy-2'-fluorouridine-3'-phosphate
  modified_base 17: mod_base = OTHER; note = 2'-O-methyluridine-3'-phosphate
  modified_base 18: mod_base = OTHER; note = 2'-O-methyluridine-3'-phosphate
  modified_base 19: mod_base = OTHER; note = 2'-O-methyladenosine-3'-phosphate
  modified_base 20: mod_base = OTHER; note = 2'-O-methyluridine-3'-phosphate
  modified_base 21: mod_base = OTHER; note = 2'-O-methyluridine-3'-phosphorothioate
  modified_base 22: mod_base = OTHER; note = 2'-O-methylguanosine-3'-phosphorothioate
  modified_base 23: mod_base = OTHER; note = 2'-O-methyladenosine
tcgttttcaaagcactttattga

SEQ ID NO: 2341 - RNA, 23 nt, synthetic construct
  source 1..23: mol_type = other RNA
  modified_base 1: mod_base = OTHER; note = 2'-O-methyluridine-3'-phosphate
  modified_base 2: mod_base = OTHER; note = 2'-O-methylcytidine-3'-phosphate
  modified_base 3: mod_base = OTHER; note = 2'-O-methyladenosine-3'-phosphate
  modified_base 4: mod_base = OTHER; note = 2'-O-methyladenosine-3'-phosphate
  modified_base 5: mod_base = OTHER; note = 2'-O-methyluridine-3'-phosphate
  modified_base 6: mod_base = OTHER; note = 2'-O-methyladenosine-3'-phosphate
  modified_base 7: mod_base = OTHER; note = 2'-O-methyladenosine-3'-phosphate
  modified_base 8: mod_base = OTHER; note = 2'-O-methyladenosine-3'-phosphate
  modified_base 9: mod_base = OTHER; note = 2'-O-methylguanosine-3'-phosphate
  modified_base 10: mod_base = OTHER; note = 2'-O-methyluridine-3'-phosphate
  modified_base 11: mod_base = OTHER; note = 2'-O-methylguanosine-3'-phosphate
  modified_base 12: mod_base = OTHER; note = 2'-O-methylcytidine-3'-phosphate
  modified_base 13: mod_base = OTHER; note = 2'-O-methyluridine-3'-phosphate
  modified_base 14: mod_base = OTHER; note = 2'-O-methyluridine-3'-phosphate
  modified_base 15: mod_base = OTHER; note = 2'-O-methyluridine-3'-phosphate
  modified_base 16: mod_base = OTHER; note = 2'-O-methylguanosine-3'-phosphate
  modified_base 17: mod_base = OTHER; note = 2'-O-methyladenosine-3'-phosphate
  modified_base 18: mod_base = OTHER; note = 2'-O-methyladenosine-3'-phosphate
  modified_base 19: mod_base = OTHER; note = 2'-O-methyladenosine-3'-phosphate
  modified_base 20: mod_base = OTHER; note = 2'-O-methyladenosine-3'-phosphate
  modified_base 21: mod_base = OTHER; note = 2'-O-methylcytidine-3'-phosphate
  modified_base 22: mod_base = OTHER; note = 2'-O-methylguanosine-3'-phosphate
  modified_base 23: mod_base = OTHER; note = 2'-O-methyladenosine
tcaataaagtgctttgaaaacga

SEQ ID NO: 2342 - RNA, 23 nt, synthetic construct
  source 1..23: mol_type = other RNA
  modified_base 1: mod_base = OTHER; note = 2'-O-methyluridine-3'-phosphate
  modified_base 2: mod_base = OTHER; note = 2'-O-methylcytidine-3'-phosphate
  modified_base 3: mod_base = OTHER; note = 2'-O-methyladenosine-3'-phosphate
  modified_base 4: mod_base = OTHER; note = 2'-O-methyladenosine-3'-phosphate
  modified_base 5: mod_base = OTHER; note = 2'-O-methyluridine-3'-phosphate
  modified_base 6: mod_base = OTHER; note = 2'-O-methyladenosine-3'-phosphate
  modified_base 7: mod_base = OTHER; note = 2'-O-methyladenosine-3'-phosphate
  modified_base 8: mod_base = OTHER; note = 2'-O-methyladenosine-3'-phosphate
  modified_base 9: mod_base = OTHER; note = 2'-O-methylguanosine-3'-phosphate
  modified_base 10: mod_base = OTHER; note = 2'-O-methyluridine-3'-phosphate
  modified_base 11: mod_base = OTHER; note = 2'-O-methylguanosine-3'-phosphate
  modified_base 12: mod_base = OTHER; note = 2'-O-methylcytidine-3'-phosphate
  modified_base 13: mod_base = OTHER; note = 2'-O-methyluridine-3'-phosphate
  modified_base 14: mod_base = OTHER; note = 2'-O-methyluridine-3'-phosphate
  modified_base 15: mod_base = OTHER; note = 2'-O-methyluridine-3'-phosphate
  modified_base 16: mod_base = OTHER; note = 2'-O-methylguanosine-3'-phosphate
  modified_base 17: mod_base = OTHER; note = 2'-O-methyladenosine-3'-phosphate
  modified_base 18: mod_base = OTHER; note = 2'-O-methyladenosine-3'-phosphate
  modified_base 19: mod_base = OTHER; note = 2'-O-methyladenosine-3'-phosphate
  modified_base 20: mod_base = OTHER; note = 2'-O-methyladenosine-3'-phosphate
  modified_base 21: mod_base = OTHER; note = 2'-O-methylcytidine-3'-phosphate
  modified_base 22: mod_base = OTHER; note = 2'-O-methylguanosine-3'-phosphate
  modified_base 23: mod_base = OTHER; note = 2'-O-methyladenosine
tcaataaagtgctttgaaaacga

SEQ ID NO: 2343 - DNA, 21 bp, synthetic construct
  source 1..21: mol_type = other DNA
  modified_base 1: mod_base = OTHER; note = 2'-O-methylcytidine-3'-phosphate
  modified_base 2: mod_base = OTHER; note = 2'-O-methyluridine-3'-phosphate
  modified_base 3: mod_base = OTHER; note = 2'-O-methyluridine-3'-phosphate
  modified_base 4: mod_base = OTHER; note = adenosine-3'-phosphate
  modified_base 5: mod_base = OTHER; note = 2'-O-methylcytidine-3'-phosphate
  modified_base 6: mod_base = OTHER; note = guanosine-3'-phosphate
  modified_base 7: mod_base = OTHER; note = 2'-O-methylcytidine-3'-phosphate
  modified_base 8: mod_base = OTHER; note = 2'-O-methyluridine-3'-phosphate
  modified_base 9: mod_base = OTHER; note = guanosine-3'-phosphate
  modified_base 10: mod_base = OTHER; note = adenosine-3'-phosphate
  modified_base 11: mod_base = OTHER; note = guanosine-3'-phosphate
  modified_base 12: mod_base = OTHER; note = 2'-O-methyluridine-3'-phosphate
  modified_base 13: mod_base = OTHER; note = adenosine-3'-phosphate
  modified_base 14: mod_base = OTHER; note = 2'-O-methylcytidine-3'-phosphate
  modified_base 15: mod_base = OTHER; note = 2'-O-methyluridine-3'-phosphate
  modified_base 16: mod_base = OTHER; note = 2'-O-methyluridine-3'-phosphate
  modified_base 17: mod_base = OTHER; note = 2'-O-methylcytidine-3'-phosphate
  modified_base 18: mod_base = OTHER; note = guanosine-3'-phosphate
  modified_base 19: mod_base = OTHER; note = adenosine-3'-phosphate
  modified_base 20: mod_base = OTHER; note = 2'-deoxythymidine-3'-phosphorothioate
  misc_feature 1..19: note = RNA
  misc_feature 20..21: note = DNA
cttacgctgagtacttcgatt

SEQ ID NO: 2344 - DNA, 21 bp, synthetic construct
  source 1..21: mol_type = other DNA
  modified_base 1: mod_base = OTHER; note = uridine-3'-phosphate
  modified_base 2: mod_base = OTHER; note = cytidine-3'-phosphate
  modified_base 3: mod_base = OTHER; note = guanosine-3'-phosphate
  modified_base 4: mod_base = OTHER; note = adenosine-3'-phosphate
  modified_base 5: mod_base = OTHER; note = adenosine-3'-phosphate
  modified_base 6: mod_base = OTHER; note = guanosine-3'-phosphate
  modified_base 7: mod_base = OTHER; note = 2'-O-methyluridine-3'-phosphate
  modified_base 8: mod_base = OTHER; note = adenosine-3'-phosphate
  modified_base 9: mod_base = OTHER; note = cytidine-3'-phosphate
  modified_base 10: mod_base = OTHER; note = uridine-3'-phosphate
  modified_base 11: mod_base = OTHER; note = 2'-O-methylcytidine-3'-phosphate
  modified_base 12: mod_base = OTHER; note = adenosine-3'-phosphate
  modified_base 13: mod_base = OTHER; note = guanosine-3'-phosphate
  modified_base 14: mod_base = OTHER; note = cytidine-3'-phosphate
  modified_base 15: mod_base = OTHER; note = guanosine-3'-phosphate
  modified_base 16: mod_base = OTHER; note = 2'-O-methyluridine-3'-phosphate
  modified_base 17: mod_base = OTHER; note = adenosine-3'-phosphate
  modified_base 18: mod_base = OTHER; note = adenosine-3'-phosphate
  modified_base 19: mod_base = OTHER; note = guanosine-3'-phosphate
  modified_base 20: mod_base = OTHER; note = 2'-deoxythymidine-3'-phosphorothioate
  misc_feature 1..19: note = RNA
  misc_feature 20..21: note = DNA
tcgaagtactcagcgtaagtt
